(19) United States
(12) Patent Application Publication
(10) Pub. No.: US 2025/0043281 A1
(43) Pub. Date: Feb. 6, 2025

(54) TREATMENT OF FGG RELATED DISEASES AND DISORDERS

(71) Applicant: Empirico Inc., San Diego, CA (US)

(72) Inventors: Omri GOTTESMAN, San Diego, CA (US); Shannon BRUSE, San Diego, CA (US); Brian CAJES, San Diego, CA (US); David LEWIS, Madison, WI (US); David ROZEMA, Cross Plains, WI (US); John VEKICH, San Diego, CA (US)

(21) Appl. No.: 18/714,537

(22) PCT Filed: Dec. 5, 2022
(86) PCT No.: PCT/US22/80933

§ 371 Date: May 29, 2024

Related U.S. Application Data
(60) Provisional application No. 63/286,393, filed on Dec. 6, 2021.

(51) Int. Cl. C12N 15/113; A61P 25/24; A61P 25/28

(52) U.S. Cl. CPC C12N 15/113; A61P 25/24; A61P 25/28; C12N 2310/11; C12N 2310/14; C12N 2310/315; C12N 2310/321; C12N 2310/322; C12N 2310/3231; C12N 2310/351

(57) ABSTRACT

Disclosed herein are compositions comprising an oligonucleotide that targets FGG. The oligonucleotide may include a small interfering RNA (siRNA) or an antisense oligonucleotide (ASO). Also provided herein are methods of treating a mental disorder, or a condition associated with an FGG mutation. The method may include providing an oligonucleotide to a subject that targets FGG.

### CROSS-REFERENCE

[0001] This application claims the benefit of U.S. Provisional No. 63/286,393, filed Dec. 6, 2021, which application is incorporated herein by reference.

### INCORPORATION BY REFERENCE OF SEQUENCE LISTING

[0002] The present application is being filed along with a Sequence Listing in electronic format. The Sequence Listing is provided as a file entitled 54462-736601.xml, created Dec. 3, 2022, which is 5155 kilobytes in size. The information in the electronic format of the Sequence Listing is incorporated by reference in its entirety.

### BACKGROUND

[0003] Psychiatric and neurological diseases are widely abundant, and may affect a wide variety of people. Improved therapeutics are needed for treating these disorders.

### SUMMARY

[0004] Disclosed herein, in some embodiments, are compositions comprising an oligonucleotide that targets fibrinogen gamma gene (FGG). Disclosed herein, in some embodiments, are compositions comprising an oligonucleotide that targets FGG and when administered to a subject in an effective amount improves a mental disorder measurement of a mental disorder. In some embodiments, the mental disorder comprises a psychiatric disorder. In some embodiments, the psychiatric disorder comprises a depressive disorder (e.g., major depressive disorder, persistent depressive disorder, treatment resistant depression and signs or symptoms of depression), post-traumatic stress disorder, mood disorder, anxiety disorder, eating disorder, substance-use disorder, bipolar disorder, personality disorder, schizophrenia, or schizoaffective disorder. In some embodiments, the mental disorder measurement is chosen from the group consisting of a Montgomery-Asberg Depression Rating Scale (MADRS) score, a Hamilton Depression Rating Scale-17 score, anxiety signs and symptoms, eating disorder signs and symptoms, substance-use disorder signs and symptoms, post-traumatic stress disorder signs and symptoms, bipolar disorder signs and symptoms, schizophrenia signs and symptoms, and psychosis signs and symptoms. In some embodiments, the mental disorder comprises a neurological disorder. In some embodiments, the neurological disorder comprises Alzheimer's disease, dementia, delirium, cognitive decline, vascular dementia, headache (e.g., migraine), chronic pain (e.g., fibromyalgia), chronic fatigue syndrome (e.g. myalgic encephalomyelitis), or motor neuron disease (e.g., amyotrophic lateral sclerosis). In some embodiments, the mental disorder measurement is chosen from the group consisting of cognitive function, CNS amyloid plaques, CNS tau accumulation, CSF beta-amyloid 42, CSF tau, CSF phospho-tau, Lewy bodies, CSF alpha-synuclein, headache symptoms or signs, migraine symptoms or signs, chronic pain symptoms or signs, fibromyalgia symptoms or signs, chronic fatigue syndrome (e.g. myalgic encephalomyelitis) symptoms or signs, and motor neuron disease (e.g., amyotrophic lateral sclerosis) symptoms or signs. In some embodiments, the oligonucleotide comprises a modified internucleoside linkage. In some embodiments, the modified internucleoside linkage comprises alkylphosphonate, phosphorothioate, methylphosphonate, phosphorodithioate, alkylphosphonothioate, phosphoramidate, carbamate, carbonate, phosphate triester, acetamidate, or carboxymethyl ester, or a combination thereof. In some embodiments, the modified internucleoside linkage comprises one or more phosphorothioate linkages. In some embodiments, the oligonucleotide comprises 1, 2, 3, 4, 5, 6, 7, 8, 9, 10, 11, 12, 13, 14, 15, 16, 17, 18, 19, or 20 modified internucleoside linkages. In some embodiments, the oligonucleotide comprises a modified nucleoside. In some embodiments, the modified nucleoside comprises a locked nucleic acid (LNA), hexitol nucleic acid (HLA), cyclohexene nucleic acid (CeNA), 2′-methoxyethyl, 2′-O-alkyl, 2′-O-allyl, 2′-O-allyl, 2′-fluoro, or 2′-deoxy, or a combination thereof. In some embodiments, the modified nucleoside comprises a LNA. In some embodiments, the modified nucleoside comprises a 2′,4′ constrained ethyl nucleic acid. In some embodiments, the modified nucleoside comprises a 2′-O-methyl nucleoside, 2′-deoxyfluoro nucleoside, 2′-O—N-methylacetamido (2′-O-NMA) nucleoside, a 2′-O-dimethylaminoethoxyethyl (2′-O-DMAEOE) nucleoside, 2′-O-aminopropyl (2′-O-AP) nucleoside, or 2′-ara-F, or a combination thereof. In some embodiments, the modified nucleoside comprises one or more 2′fluoro modified nucleosides. In some embodiments, the modified nucleoside comprises a 2′ O-alkyl modified nucleoside. In some embodiments, the oligonucleotide comprises 1, 2, 3, 4, 5, 6, 7, 8, 9, 10, 11, 12, 13, 14, 15, 16, 17, 18, 19, 20, or 21 modified nucleosides. In some embodiments, the oligonucleotide comprises a lipid attached at a 3′ or 5′ terminus of the oligonucleotide. In some embodiments, the lipid comprises cholesterol, myristoyl, palmitoyl, stearoyl, lithocholoyl, docosanoyl, docosahexaenoyl, myristyl, palmityl stearyl, or α-tocopherol, or a combination thereof. In some embodiments, the oligonucleotide comprises a sugar moiety attached at a 3′ or 5′ terminus of the oligonucleotide. In some embodiments, the sugar comprises N-acetylgalactosamine (GalNAc), N-acetylglucosamine (GlcNAc), or mannose. The sugar moiety may comprise ETL17. In some embodiments, the oligonucleotide comprises a small interfering RNA (siRNA) comprising a sense strand and an antisense strand. In some embodiments, the sense strand is 12-30 nucleosides in length. In some embodiments, the antisense strand is 12-30 nucleosides in length. Disclosed herein, in some embodiments, are compositions comprising an oligonucleotide that inhibits the expression of FGG, wherein the oligonucleotide comprises an siRNA comprising a sense strand and an antisense strand, each strand is independently about 12-30 nucleosides in length, and at least one of the sense strand and the antisense strand comprises a nucleoside sequence comprising about 12-30 contiguous nucleosides of SEQ ID NO: 3621. In some embodiments, any one of the following is true with regard to the sense strand: all purines comprise 2′ fluoro modified purines, and all pyrimidines comprise a mixture of 2′ fluoro and 2′-O-methyl modified pyrimidines; all purines comprise 2′-O-methyl modified purines, and all pyrimidines comprise a mixture of 2′ fluoro and 2′-O-methyl modified pyrimidines; all purines comprise 2′ fluoro modified purines, and all pyrimidines comprise 2′-O-methyl modified pyrimidines; all pyrimidines comprise 2′ fluoro modified pyrimidines, and all purines comprise a mixture of 2′ fluoro and 2′-O-methyl modified purines; all pyrimidines comprise 2′-O-methyl modified pyrimidines, and all purines comprise a mixture of 2′ fluoro and 2′-O-methyl modified purines; or all pyrimidines comprise 2′ fluoro modified pyrimidines, and all purines comprise 2′-O-methyl modified purines. In some embodiments, the sense strand comprises any one of modification patterns 1S, 2S, 3S, 4S, 5S, 6S, 7S, 8S, 9S, 10S, 11S, 12S, 13S, 14S, 15S, 156S, 17S, 18S, 19S, 20S, 21S, 22S, 23S, 24S, 25S, 28S, or 29S. In some embodiments, any one of the following is true with regard to the antisense strand: all purines comprise 2′ fluoro modified purines, and all pyrimidines comprise a mixture of 2′ fluoro and 2′-O-methyl modified pyrimidines; all purines comprise 2′-O-methyl modified purines, and all pyrimidines comprise a mixture of 2′ fluoro and 2′-O-methyl modified pyrimidines; all purines comprise 2′-O-methyl modified purines, and all pyrimidines comprise 2′ fluoro modified pyrimidines; all pyrimidines comprise 2′ fluoro modified pyrimidines, and all purines comprise a mixture of 2′ fluoro and 2′-O-methyl modified purines; all pyrimidines comprise 2′-O-methyl modified pyrimidines, and all purines comprise a mixture of 2′ fluoro and 2′-O-methyl modified purines; or all pyrimidines comprise 2′-O-methyl modified pyrimidines, and all purines comprise 2′ fluoro modified purines. In some embodiments, the antisense strand comprises any one of modification patterns 1AS, 2AS, 3AS, 4AS, 5AS, 6AS, 7AS, 8AS, 9AS, 10AS, 11AS, 12AS, 13AS, 14AS, 15AS, 16AS, 17AS, 18AS, 19AS, 20AS, or 21AS. In some embodiments, the sense strand comprises the nucleic acid sequence of any one of SEQ ID NOs: 1-1742 or 3713-3748, or a sequence thereof having 1 or 2 substitutions, additions, or deletions; and the antisense strand comprises the nucleic acid sequence of any one of SEQ ID NOs: 1743-3484 or 3749-3784, or a sequence thereof having 1 or 2 substitutions, additions, or deletions. In some embodiments, the sense strand comprises the nucleic acid sequence of any one of SEQ ID NOs: 1-1742 or 3713-3748, and the antisense strand comprises the nucleic acid sequence of any one of SEQ ID NOs: 1743-3484 or 3749-3784. In some embodiments, the sense strand comprises the nucleic acid sequence of any one of SEQ ID NOs: 3723, 3724, 3726, or 3747, or a sequence thereof having 1 or 2 substitutions, additions, or deletions; and the antisense strand comprises the nucleic acid sequence of any one of SEQ ID NOs: 3759, 3760, 3762, or 3783, or a sequence thereof having 1 or 2 substitutions, additions, or deletions. In some embodiments, the sense strand comprises the nucleic acid sequence of any one of SEQ ID NOs: 3723, 3724, 3726, or 3747, and the antisense strand comprises the nucleic acid sequence of any one of SEQ ID NOs: 3759, 3760, 3762, or 3783. In some embodiments, the sense strand comprises the nucleic acid sequence of any one of SEQ ID NOs: 352, 1003, 1011, or 1278, or a sequence thereof having 1 or 2 substitutions, additions, or deletions; and the antisense strand comprises the nucleic acid sequence of any one of SEQ ID NOs: 2094, 2745, 2753, or 3020, or a sequence thereof having 1 or 2 substitutions, additions, or deletions. In some embodiments, the sense strand comprises the nucleic acid sequence of any one of SEQ ID NOs: 352, 1003, 1011, or 1278, and the antisense strand comprises the nucleic acid sequence of any one of SEQ ID NOs: 2094, 2745, 2753, or 3020. In some embodiments, the sense strand comprises the nucleic acid sequence of any one of SEQ ID NOs: 3591-3594, or a sequence thereof having 1 or 2 substitutions, additions, or deletions; and the antisense strand comprises the nucleic acid sequence of any one of SEQ ID NOs: 3595-3598, or a sequence thereof having 1 or 2 substitutions, additions, or deletions. In some embodiments, the sense strand comprises the nucleic acid sequence of any one of SEQ ID NOs: 3591-3594, and the antisense strand comprises the nucleic acid sequence of any one of SEQ ID NOs: 3595-3598. In some embodiments, the oligonucleotide comprises an antisense oligonucleotide (ASO). In some embodiments, the ASO is 12-30 nucleosides in length. Disclosed herein, in some embodiments, are compositions comprising an oligonucleotide that inhibits the expression of FGG, wherein the oligonucleotide comprises an ASO about 12-30 nucleosides in length and a nucleoside sequence complementary to about 12-30 contiguous nucleosides of SEQ ID NO: 3621. Some embodiments include a pharmaceutically acceptable carrier. Disclosed herein, in some embodiments, are methods of treating a subject having a psychiatric disorder or a neurological disorder, comprising administering an effective amount of the composition to the subject. In some embodiments, the psychiatric disorder comprises a depressive disorder (e.g., major depressive disorder, persistent depressive disorder, treatment resistant depression and signs or symptoms of depression), post-traumatic stress disorder, mood disorder, anxiety disorders, eating disorder, substance-use disorder, bipolar disorder, personality disorder, schizophrenia, or a schizoaffective disorder. In some embodiments, the neurological disorder comprises Alzheimer's disease, dementia, delirium, cognitive decline, vascular dementia, headache (e.g., migraine), chronic pain (e.g., fibromyalgia), chronic fatigue syndrome (e.g. myalgic encephalomyelitis), and motor neuron disease (e.g., amyotrophic lateral sclerosis).

### BRIEF DESCRIPTION OF THE DRAWINGS

[0005] FIG. 1 is an example of a GalNAc ligand.

[0006] FIG. 2 is an example of a GalNAc ligand.

### DETAILED DESCRIPTION

[0007] Large-scale human genetic data can improve the success rate of pharmaceutical discovery and development. A Genome Wide Association Study (GWAS) may detect associations between genetic variants and traits in a population sample. A GWAS may enable better understanding of the biology of disease, and provide applicable treatments. A GWAS can utilize genotyping and/or sequencing data, and often involves an evaluation of millions of genetic variants that are relatively evenly distributed across the genome. The most common GWAS design is the case-control study, which involves comparing variant frequencies in cases versus controls. If a variant has a significantly different frequency in cases versus controls, that variant is said to be associated with disease. Association statistics that may be used in a GWAS are p-values, as a measure of statistical significance; odds ratios (OR), as a measure of effect size; or beta coefficients (beta), as a measure of effect size. Researchers often assume an additive genetic model and calculate an allelic odds ratio, which is the increased (or decreased) risk of disease conferred by each additional copy of an allele (compared to carrying no copies of that allele). An additional concept in design and interpretation of GWAS is that of linkage disequilibrium, which is the non-random association of alleles. The presence of linkage disequilibrium can obfuscate which variant is “causal.”

[0008] Functional annotation of variants and/or wet lab experimentation can identify the causal genetic variant identified via GWAS, and in many cases may lead to the identification of disease-causing genes. In particular, understanding the functional effect of a causal genetic variant (for example, loss of protein function, gain of protein function, increase in gene expression, or decrease in gene expression) may allow that variant to be used as a proxy for therapeutic modulation of the target gene, or to gain insight into potential therapeutic efficacy and safety of a therapeutic that modulates that target.

[0009] Identification of such gene-disease associations has provided insights into disease biology and may be used to identify novel therapeutic targets for the pharmaceutical industry. In order to translate the therapeutic insights derived from human genetics, disease biology in patients may be exogenously ‘programmed’ into replicating the observation from human genetics. There are several potential options for therapeutic modalities that may be brought to bear in translating therapeutic targets identified via human genetics into novel medicines. These may include well established therapeutic modalities such as small molecules and monoclonal antibodies, maturing modalities such as oligonucleotides, and emerging modalities such as gene therapy and gene editing. The choice of therapeutic modality can depend on several factors including the location of a target (for example, intracellular, extracellular, or secreted), a relevant tissue (for example, liver, brain, or neural tissue) and a relevant indication.

[0010] The fibrinogen gamma chain gene, also known as fibrinogen gamma gene (FGG), is located on chromosome 4, and encodes fibrinogen gamma chain (also referred to as FGG protein). The FGG protein may be a gamma component of fibrinogen. FGG protein may include 453 amino acids and have a mass of about 51.5 kDa. An example of a FGG amino acid sequence, and further description of FGG is included at uniprot.org under accession no. P02679 (last modified Sep. 29, 2021).

[0011] Here it is shown that genetic variants causing inactivation of FGG resulted in protective associations for psychiatric and neurological phenotypes. Therefore, inhibition of FGG may serve as a therapeutic for treatment of psychiatric diseases and disorders such as depressive disorder (e.g., major depressive disorder, persistent depressive disorder, treatment resistant depression, or signs and symptoms of depression), post-traumatic stress disorder (PTSD), mood disorders, anxiety disorders, eating disorders, substance-use disorders, bipolar disorder, personality disorders, schizophrenia and schizoaffective disorders, and neurological diseases and disorders such as Alzheimer's disease, dementia, delirium, cognitive decline, vascular dementia, headache, migraine, chronic pain, fibromyalgia, chronic fatigue syndrome (e.g. myalgic encephalomyelitis (ME)), or motor neuron disease (e.g., amyotrophic lateral sclerosis).

[0012] Disclosed herein are compositions comprising an oligonucleotide that targets FGG. Where inhibition or targeting of FGG is disclosed, it is contemplated that some embodiments may include inhibiting or targeting a FGG protein or FGG RNA. For example, by inhibiting or targeting an RNA (e.g. mRNA) encoded by the FGG gene using an oligonucleotide described herein, the FGG protein may be inhibited or targeted as a result of there being less production of the FGG protein by translation of the FGG RNA; or a FGG protein may be targeted or inhibited by an oligonucleotide that binds or interacts with a FGG RNA and reduces production of the FGG protein from the FGG RNA. Thus, targeting FGG may refer to binding a FGG RNA and reducing FGG RNA or protein levels. The oligonucleotide may include a small interfering RNA (siRNA) or an antisense oligonucleotide (ASO).

[0013] Also provided herein are methods of treating a mental disorder, such as a psychiatric disorder or neurological disorder or disease by providing or administering an oligonucleotide that targets FGG to a subject in need thereof. Administration of the oligonucleotide to a subject may improve psychiatric related traits, such as Montgomery-Asberg Depression Rating Scale (MADRS) (e.g. scale ranges from 0 to 60 with a higher score indicating worsening symptoms of depression), Hamilton Depression Rating Scale-17 (e.g. scale ranges from 0 to 52 with a higher score indicating worsening symptoms of depression), anxiety symptoms and signs, eating disorder symptoms and signs, substance-use disorder symptoms and signs, post-traumatic stress disorder symptoms and signs, bipolar disorder symptoms and signs, schizophrenia symptoms and signs, or psychosis symptoms and signs. Additionally, administration of the oligonucleotide to a subject may improve neurological related traits, such as Cognitive function, CNS amyloid plaques (e.g., accumulation), CNS tau accumulation, CSF beta-amyloid 42 (e.g., accumulation), CSF tau (e.g., accumulation), CSF phospho-tau (e.g., accumulation), Lewy bodies (e.g., accumulation), CSF alpha-synuclein (e.g., accumulation), headache symptoms and signs, migraine symptoms and signs, chronic pain symptoms and signs, fibromyalgia symptoms and signs, chronic fatigue syndrome (ME) symptoms and signs, or motor neuron disease (e.g. ALS) symptoms or signs.

### I. Compositions

[0014] Disclosed herein, in some embodiments, are compositions comprising an oligonucleotide. In some embodiments, the composition comprises an oligonucleotide that targets FGG. In some embodiments, the composition consists of an oligonucleotide that targets FGG. In some embodiments, the oligonucleotide reduces FGG mRNA expression in the subject. In some embodiments, the oligonucleotide reduces FGG protein expression in the subject. The oligonucleotide may include a small interfering RNA (siRNA) described herein. The oligonucleotide may include an antisense oligonucleotide (ASO) described herein. In some embodiments, a composition described herein is used in a method of treating a disorder in a subject in need thereof. Some embodiments relate to a composition comprising an oligonucleotide for use in a method of treating a disorder as described herein. Some embodiments relate to use of a composition comprising an oligonucleotide, in a method of treating a disorder (e.g., psychiatric or neurological) as described herein.

[0015] Some embodiments include a composition comprising an oligonucleotide that targets FGG and when administered to a subject in an effective amount decreases FGG mRNA or protein levels in a cell (e.g. hepatocyte or neuron), fluid (e.g., blood, serum, plasma, or cerebrospinal fluid (CSF)), tissue (e.g. brain or liver tissue), or organ (e.g., the brain or liver).

[0016] In some embodiments, the composition comprises an oligonucleotide that targets FGG and when administered to a subject in an effective amount decreases FGG mRNA levels in a cell or tissue. In some embodiments, the cell is a liver cell (e.g., hepatocyte). In some embodiments, the cell is a neuron. In some embodiments, the tissue is liver tissue. In some embodiments, the tissue is neural tissue. In some embodiments, the neural tissue is CNS tissue. In some embodiments, the neural tissue is brain tissue (e.g., neuronal, glia, or endothelial tissue). In some embodiments, the fluid is CSF. In some embodiments, the FGG mRNA levels are decreased by about 2.5% or more, about 5% or more, or about 7.5% or more, as compared to prior to administration. In some embodiments, the FGG mRNA levels are decreased by about 10% or more, as compared to prior to administration. In some embodiments, the FGG mRNA levels are decreased by about 20% or more, about 30% or more, about 40% or more, about 50% or more, about 60% or more, about 70% or more, about 80% or more, about 90% or more, or about 100%, as compared to prior to administration. In some embodiments, the FGG mRNA levels are decreased by no more than about 2.5%, no more than about 5%, or no more than about 7.5%, as compared to prior to administration. In some embodiments, the FGG mRNA levels are decreased by no more than about 10%, as compared to prior to administration. In some embodiments, the FGG mRNA levels are decreased by no more than about 20%, no more than about 30%, no more than about 40%, no more than about 50%, no more than about 60%, no more than about 70%, no more than about 80%, or no more than about 90%, as compared to prior to administration. In some embodiments, the FGG mRNA levels are decreased by 2.5%, 5%, 7.5%, 10%, 15%, 20%, 25%, 30%, 35%, 40%, 45%, 50%, 55%, 60%, 65%, 70%, 75%, 80%, 85%, 90%, 95%, or 100%, or by a range defined by any of the two aforementioned percentages.

[0017] In some embodiments, the composition comprises an oligonucleotide that targets FGG and when administered to a subject in an effective amount decreases FGG protein levels in a cell, fluid (e.g., CSF) or tissue. In some embodiments, the cell is a hepatocyte. In some embodiments, the cell is a neural cell (e.g., CNS cell (e.g., brain cell)). In some embodiments, the cell is a neuronal cell. In some embodiments, the cell is a glial cell. In some embodiments, the cell is an endothelial cell. In some embodiments, the tissue is liver tissue. In some embodiments, the tissue is neural (e.g. CNS (e.g., brain)) tissue. In some embodiments, the fluid is CSF. In some embodiments, the FGG protein levels are decreased by about 2.5% or more, about 5% or more, or about 7.5% or more, as compared to prior to administration. In some embodiments, the FGG protein levels are decreased by about 10% or more, as compared to prior to administration. In some embodiments, the FGG protein levels are decreased by about 20% or more, about 30% or more, about 40% or more, about 50% or more, about 60% or more, about 70% or more, about 80% or more, about 90% or more, or about 100%, as compared to prior to administration. In some embodiments, the FGG protein levels are decreased by no more than about 2.5%, no more than about 5%, or no more than about 7.5%, as compared to prior to administration. In some embodiments, the FGG protein levels are decreased by no more than about 10%, as compared to prior to administration. In some embodiments, the FGG protein levels are decreased by no more than about 20%, no more than about 30%, no more than about 40%, no more than about 50%, no more than about 60%, no more than about 70%, no more than about 80%, or no more than about 90%, as compared to prior to administration. In some embodiments, the FGG protein levels are decreased by 2.5%, 5%, 7.5%, 10%, 15%, 20%, 25%, 30%, 35%, 40%, 45%, 50%, 55%, 60%, 65%, 70%, 75%, 80%, 85%, 90%, 95%, or 100%, or by a range defined by any of the two aforementioned percentages.

[0018] In some embodiments, the composition comprises an oligonucleotide that targets FGG and when administered to a subject in an effective amount diminishes a mental disorder or disease phenotype, such as a psychiatric disorder or neurological disorder phenotype. A disorder may include a disease. The psychiatric disease or disorder may include depressive disorder (e.g., major depressive disorder, persistent depressive disorder, treatment resistant depression, or signs and symptoms of depression), post-traumatic stress disorder, mood disorders, anxiety disorders, eating disorders, substance-use disorders, bipolar disorder, personality disorders, schizophrenia and schizoaffective disorders. The neurological disease or disorder may include such as Alzheimer's disease, dementia, delirium, cognitive decline, vascular dementia, headache, migraine, chronic pain, fibromyalgia, chronic fatigue syndrome (e.g. myalgic encephalomyelitis (ME)), or motor neuron disease (e.g., amyotrophic lateral sclerosis). For psychiatric/neurological indications, fibrinogen may be lowered enough to have a therapeutic effect on mental disorders but without significantly affecting coagulation parameters such as PT or aPTT.

[0019] In some embodiments, the composition comprises an oligonucleotide that targets FGG and when administered to a subject in an effective amount decreases a psychiatric disease phenotype. The psychiatric disease phenotype may include a Montgomery-Asberg Depression Rating Scale (MADRS) score. The psychiatric disease phenotype may include a Hamilton Depression Rating Scale score. The psychiatric disease phenotype may include a sign or symptom of anxiety. The psychiatric disease phenotype may include a sign or symptom of an eating disorder. The psychiatric disease phenotype may include a sign or symptom of a substance-use disorder. The psychiatric disease phenotype may include a sign or symptom of post-traumatic stress disorder. The psychiatric disease phenotype may include a sign or symptom of bipolar disorder. The psychiatric disease phenotype may include a sign or symptom of schizophrenia. The psychiatric disease phenotype may include a sign or symptom of psychosis. In some embodiments, the psychiatric disease phenotype is decreased by about 2.5% or more, about 5% or more, or about 7.5% or more, as compared to prior to administration. In some embodiments, the psychiatric disease phenotype is decreased by about 10% or more, as compared to prior to administration. In some embodiments, the psychiatric disease phenotype is decreased by about 20% or more, about 30% or more, about 40% or more, about 50% or more, about 60% or more, about 70% or more, about 80% or more, about 90% or more, or about 100%, as compared to prior to administration. In some embodiments, the psychiatric disease phenotype is decreased by no more than about 2.5%, no more than about 5%, or no more than about 7.5%, as compared to prior to administration. In some embodiments, the psychiatric disease phenotype is decreased by no more than about 10%, as compared to prior to administration. In some embodiments, the psychiatric disease phenotype is decreased by no more than about 20%, no more than about 30%, no more than about 40%, no more than about 50%, no more than about 60%, no more than about 70%, no more than about 80%, or no more than about 90%, as compared to prior to administration. In some embodiments, the psychiatric disease phenotype is decreased by 2.5%, 5%, 7.5%, 10%, 15%, 20%, 25%, 30%, 35%, 40%, 45%, 50%, 55%, 60%, 65%, 70%, 75%, 80%, 85%, 90%, 95%, or 100%, or by a range defined by any of the two aforementioned percentages.

[0020] In some embodiments, the composition comprises an oligonucleotide that targets FGG and when administered to a subject in an effective amount decreases a neurological disease phenotype. The neurological disease phenotype may include cognitive dysfunction. The neurological disease phenotype may include central nervous system (CNS) amyloid plaques. The neurological disease phenotype may include CNS tau accumulation. The neurological disease phenotype may include cerebrospinal fluid (CSF) beta-amyloid 42. The neurological disease phenotype may include CSF tau. The neurological disease phenotype may include CSF phospho-tau. The neurological disease phenotype may include Lewy bodies. The neurological disease phenotype may include CSF alpha-synuclein. The neurological disease phenotype may include headache symptoms or signs. The neurological disease phenotype may include migraine symptoms or signs. The neurological disease phenotype may include chronic pain symptoms or signs. The neurological disease phenotype may include fibromyalgia symptoms or signs. The neurological disease phenotype may include chronic fatigue syndrome (e.g. myalgic encephalomyelitis) symptoms or signs. The neurological disease phenotype may include motor neuron disease (e.g., amyotrophic lateral sclerosis) symptoms or signs. In some embodiments, the neurological disease phenotype is decreased by about 2.5% or more, about 5% or more, or about 7.5% or more, as compared to prior to administration. In some embodiments, the neurological disease phenotype is decreased by about 10% or more, as compared to prior to administration. In some embodiments, the neurological disease phenotype is decreased by about 20% or more, about 30% or more, about 40% or more, about 50% or more, about 60% or more, about 70% or more, about 80% or more, about 90% or more, or about 100%, as compared to prior to administration. In some embodiments, the neurological disease phenotype is decreased by no more than about 2.5%, no more than about 5%, or no more than about 7.5%, as compared to prior to administration. In some embodiments, the neurological disease phenotype is decreased by no more than about 10%, as compared to prior to administration. In some embodiments, the neurological disease phenotype is decreased by no more than about 20%, no more than about 30%, no more than about 40%, no more than about 50%, no more than about 60%, no more than about 70%, no more than about 80%, or no more than about 90%, as compared to prior to administration. In some embodiments, the neurological disease phenotype is decreased by 2.5%, 5%, 7.5%, 10%, 15%, 20%, 25%, 30%, 35%, 40%, 45%, 50%, 55%, 60%, 65%, 70%, 75%, 80%, 85%, 90%, 95%, or 100%, or by a range defined by any of the two aforementioned percentages.

[0021] The composition may treat a clotting or coagulation disorder. The composition may treat thrombophilia. The composition may affect clotting or a clotting time. In some embodiments, the composition comprises an oligonucleotide that decreases Fibrinogen. In some cases, a FGG siRNA composition may be useful as an anticoagulant, such as for treatment or prophylaxis of a coagulation or clotting disorders (e.g. venous thromboembolism, atrial fibrillation), given that significant FGG knockdown may lead to a prolonged clotting time (e.g. PT, INR or aPTT). For coagulation or clotting disorders, it is useful to lower Fibrinogen significantly enough to prolong clotting times to clinically meaningful levels for these indications. Provided herein are data that show FGG siRNA administration may result in FGG knockdown. FGG knockdown may result in decreased circulating fibrinogen. Decreased circulating fibrinogen may result in increased PT, INR and aPTT. As such, the compounds may be useful for reducing clotting. Some aspects relate to a composition comprising an oligonucleotide that targets FGG and when administered to a subject in an effective amount decreases fibrinogen.

[0022] In some embodiments, the prothrombin time (PT), International Normalized Ration (INR) and activated partial thromboplastin time (aPTT) levels are unchanged as compared to administration. In some embodiments, PT, INR or aPTT increases by no more than about 10%, as compared to prior to administration. In some embodiments, PT, INR or aPTT increase by no more than about 20%, no more than about 40%, no more than about 80%, no more than about 160%, no more than about 200%, no more than about 300%, no more than about 400%, or no more than about 600%, as compared to prior to administration. In some embodiments, the PT, INR or aPTT increases by 5%, 10%, 20%, 40%, 80%, 100%, 200%, 400% or 600%, or by a range defined by any of the two aforementioned percentages.

A. siRNAs

[0023] In some embodiments, the composition comprises an oligonucleotide that targets FGG, wherein the oligonucleotide comprises a small interfering RNA (siRNA). In some embodiments, the composition comprises an oligonucleotide that targets FGG, wherein the oligonucleotide comprises a small interfering RNA (siRNA) comprising a sense strand and an antisense strand.

[0024] In some embodiments, the composition comprises an oligonucleotide that inhibits the expression of FGG, wherein the oligonucleotide comprises an siRNA comprising a sense strand and an antisense strand, wherein the sense strand is 12-30 nucleosides in length. In some embodiments, the composition comprises a sense strange that is 10, 11, 12, 13, 14, 15, 16, 17, 18, 19, 20, 21, 22, 23, 24, 25, 26, 27, 28, 29, or 30 nucleosides in length, or a range defined by any of the two aforementioned numbers. The sense strand may be 14-30 nucleosides in length. In some embodiments, the composition comprises an antisense strand is 12-30 nucleosides in length. In some embodiments, the composition comprises an antisense strand that is 10, 11, 12, 13, 14, 15, 16, 17, 18, 19, 20, 21, 22, 23, 24, 25, 26, 27, 28, 29, or 30 nucleosides in length, or a range defined by any of the two aforementioned numbers. The antisense strand may be 14-30 nucleosides in length.

[0025] In some embodiments, the composition comprises an oligonucleotide that inhibits the expression of FGG, wherein the oligonucleotide comprises an siRNA comprising a sense strand and an antisense strand, each strand is independently about 12-30 nucleosides in length, and at least one of the sense strand and the antisense strand comprises a nucleoside sequence comprising about 12-30 contiguous nucleosides of a full-length human FGG mRNA sequence such as SEQ ID NO: 3621. In SEQ ID NO: 3621, thymine (T) may be replaced with Uracil (U). In some embodiments, at least one of the sense strand and the antisense strand comprise a nucleoside sequence comprising at least about 10, 11, 12, 13, 14, 15, 16, 17, 18, 19, 20, 21, 22, 23, 24, 25, 26, 27, 28, 29, 30, or more contiguous nucleosides of one of SEQ ID NO: 3621.

[0026] In some embodiments, the composition comprises an oligonucleotide that inhibits the expression of FGG, wherein the oligonucleotide comprises an siRNA comprising a sense strand and an antisense strand, wherein the sense strand and the antisense strand form a double-stranded RNA duplex. In some embodiments, the first base pair of the double-stranded RNA duplex is an AU base pair.

[0027] In some embodiments, the sense strand further comprises a 3′ overhang. In some embodiments, the 3′ overhang comprises 1, 2, 3, 4, 5, 6, 7, 8, 9, or 10 nucleosides, or a range of nucleotides defined by any two of the aforementioned numbers. In some embodiments, the 3′ overhang comprises 1, 2, or more nucleosides. In some embodiments, the 3′ overhang comprises 2 nucleosides. In some embodiments, the sense strand further comprises a 5′ overhang. In some embodiments, the 5′ overhang comprises 1, 2, 3, 4, 5, 6, 7, 8, 9, or 10 nucleosides, or a range of nucleotides defined by any two of the aforementioned numbers. In some embodiments, the 5′ overhang comprises 1, 2, or more nucleosides. In some embodiments, the 5′ overhang comprises 2 nucleosides.

[0028] In some embodiments, the antisense strand further comprises a 3′ overhang. In some embodiments, the 3′ overhang comprises 1, 2, 3, 4, 5, 6, 7, 8, 9, or 10 nucleosides, or a range of nucleotides defined by any two of the aforementioned numbers. In some embodiments, the 3′ overhang comprises 1, 2, or more nucleosides. In some embodiments, the 3′ overhang comprises 2 nucleosides. In some embodiments, the antisense strand further comprises a 5′ overhang. In some embodiments, the 5′ overhang comprises 1, 2, 3, 4, 5, 6, 7, 8, 9, or 10 nucleosides, or a range of nucleotides defined by any two of the aforementioned numbers. In some embodiments, the 5′ overhang comprises 1, 2, or more nucleosides. In some embodiments, the 5′ overhang comprises 2 nucleosides.

[0029] In some embodiments, the composition comprises an oligonucleotide that inhibits the expression of FGG, wherein the oligonucleotide comprises an siRNA comprising a sense strand and an antisense strand, wherein the siRNA binds with a 19mer in a human FGG mRNA. In some embodiments, the siRNA binds with a 12mer, a 13mer, a 14mer, a 15mer, a 16mer, a 17mer, a 18mer, a 19mer, a 20mer, a 21mer, a 22mer, a 23mer, a 24mer, or a 25mer in a human FGG mRNA.

[0030] In some embodiments, the composition comprises an oligonucleotide that inhibits the expression of FGG, wherein the oligonucleotide comprises an siRNA comprising a sense strand and an antisense strand, wherein the siRNA binds with a 17mer in a non-human primate FGG mRNA. In some embodiments, the siRNA binds with a 12mer, a 13mer, a 14mer, a 15mer, a 16mer, a 17mer, a 18mer, a 19mer, a 20mer, a 21mer, a 22mer, a 23mer, a 24mer, or a 25mer in a non-human primate FGG mRNA.

[0031] In some embodiments, the composition comprises an oligonucleotide that inhibits the expression of FGG, wherein the oligonucleotide comprises an siRNA comprising a sense strand and an antisense strand, wherein the siRNA binds with a human FGG mRNA and less than or equal to 20 human off-targets, with no more than 2 mismatches in the antisense strand. In some embodiments, the siRNA binds with a human FGG mRNA and less than or equal to 10 human off-targets, with no more than 2 mismatches in the antisense strand. In some embodiments, the siRNA binds with a human FGG mRNA and less than or equal to 30 human off-targets, with no more than 2 mismatches in the antisense strand. In some embodiments, the siRNA binds with a human FGG mRNA and less than or equal to 40 human off-targets, with no more than 2 mismatches in the antisense strand. In some embodiments, the siRNA binds with a human FGG mRNA and less than or equal to 50 human off-targets, with no more than 2 mismatches in the antisense strand. In some embodiments, the siRNA binds with a human FGG mRNA and less than or equal to 10 human off-targets, with no more than 3 mismatches in the antisense strand. In some embodiments, the siRNA binds with a human FGG mRNA and less than or equal to 20 human off-targets, with no more than 3 mismatches in the antisense strand. In some embodiments, the siRNA binds with a human FGG mRNA and less than or equal to 30 human off-targets, with no more than 3 mismatches in the antisense strand. In some embodiments, the siRNA binds with a human FGG mRNA and less than or equal to 40 human off-targets, with no more than 3 mismatches in the antisense strand. In some embodiments, the siRNA binds with a human FGG mRNA and less than or equal to 50 human off-targets, with no more than 3 mismatches in the antisense strand.

[0032] In some embodiments, the composition comprises an oligonucleotide that inhibits the expression of FGG, wherein the oligonucleotide comprises an siRNA comprising a sense strand and an antisense strand, siRNA binds with a human FGG mRNA target site that does not harbor an SNP, with a minor allele frequency (MAF) greater or equal to 1% (pos. 2-18). In some embodiments, the MAF is greater or equal to about 2%, about 3%, about 4%, about 5%, about 6%, about 7%, about 8%, about 9%, about 10%, about 11%, about 12%, about 13%, about 14%, about 15%, about 16%, about 17%, about 18%, about 19%, or about 20%.

[0033] In some embodiments, the composition comprises an oligonucleotide that inhibits the expression of FGG, wherein the oligonucleotide comprises an siRNA comprising a sense strand and an antisense strand, wherein the sense strand comprises a nucleoside sequence comprising or consisting of the sequence of any one of SEQ ID NOs: 1-1742, or a nucleic acid sequence thereof having 1 or 2 nucleoside substitutions, additions, or deletions. In some embodiments, the sense strand comprises a nucleoside sequence comprising or consisting of the sequence of any one of SEQ ID NOs: 1-1742, or a nucleic acid sequence thereof having 3 or 4 nucleoside substitutions, additions, or deletions. In some embodiments, the sense strand further comprises a 3′ overhang. In some embodiments, the 3′ overhang comprises 1, 2, 3, 4, 5, 6, 7, 8, 9, or 10 nucleosides, or a range of nucleotides defined by any two of the aforementioned numbers. In some embodiments, the 3′ overhang comprises 1, 2, or more nucleosides. In some embodiments, the 3′ overhang comprises 2 nucleosides. In some embodiments, the sense strand further comprises a 5′ overhang. In some embodiments, the 5′ overhang comprises 1, 2, 3, 4, 5, 6, 7, 8, 9, or 10 nucleosides, or a range of nucleotides defined by any two of the aforementioned numbers. In some embodiments, the 5′ overhang comprises 1, 2, or more nucleosides. In some embodiments, the 5′ overhang comprises 2 nucleosides. In some embodiments, the sense strand comprises a nucleoside sequence comprising or consisting of the sequence of any one of SEQ ID NOs: 1-1742, or a nucleic acid sequence thereof having 1 or 2 nucleoside additions at the 3′ end. In some embodiments, the composition comprises an oligonucleotide that inhibits the expression of FGG, wherein the oligonucleotide comprises an siRNA comprising a sense strand and an antisense strand, wherein the sense strand comprises a nucleoside sequence comprising or consisting of the sequence of any one of SEQ ID NOs: 1-1742. In any of SEQ ID NOs: 1-1742, thymine (T) may be replaced with Uracil (U).

[0034] In some embodiments, the composition comprises an oligonucleotide that inhibits the expression of FGG, wherein the oligonucleotide comprises an siRNA comprising a sense strand and an antisense strand, wherein the antisense strand comprises a nucleoside sequence comprising or consisting of the sequence of any one of SEQ ID NOs: 1743-3484, or a nucleic acid sequence thereof having 1 or 2 nucleoside substitutions, additions, or deletions. In some embodiments, the antisense strand sequence comprises a nucleoside sequence comprising or consisting of the sequence of any one of SEQ ID NOs: 1743-3484 or a nucleic acid sequence thereof having 3 or 4 nucleoside substitutions, additions, or deletions. In some embodiments, the antisense strand further comprises a 3′ overhang. In some embodiments, the 3′ overhang comprises 1, 2, 3, 4, 5, 6, 7, 8, 9, or 10 nucleosides, or a range of nucleotides defined by any two of the aforementioned numbers. In some embodiments, the 3′ overhang comprises 1, 2, or more nucleosides. In some embodiments, the 3′ overhang comprises 2 nucleosides. In some embodiments, the antisense strand further comprises a 5′ overhang. In some embodiments, the 5′ overhang comprises 1, 2, 3, 4, 5, 6, 7, 8, 9, or 10 nucleosides, or a range of nucleotides defined by any two of the aforementioned numbers. In some embodiments, the 5′ overhang comprises 1, 2, or more nucleosides. In some embodiments, the 5′ overhang comprises 2 nucleosides. In some embodiments, the antisense strand comprises a nucleoside sequence comprising or consisting of the sequence of any one of SEQ ID NOs: 1743-3484, or a nucleic acid sequence thereof having 1 or 2 nucleoside additions at the 3′ end. In some embodiments, the composition comprises an oligonucleotide that inhibits the expression of FGG, wherein the oligonucleotide comprises an siRNA comprising a sense strand and an antisense strand, wherein the antisense strand comprises a nucleoside sequence comprising or consisting of the sequence of any one of SEQ ID NOs: 1743-3484. In any of SEQ ID NOs: 1743-3484, thymine (T) may be replaced with Uracil (U).

[0035] In some embodiments, the composition comprises an oligonucleotide that inhibits the expression of FGG, wherein the oligonucleotide comprises an siRNA comprising a sense strand and an antisense strand, wherein the sense strand comprises a nucleoside sequence comprising or consisting of the sequence of any one of SEQ ID NOs: 3713-3748, or a nucleic acid sequence thereof having 1 or 2 nucleoside substitutions, additions, or deletions. In some embodiments, the sense strand comprises a nucleoside sequence comprising or consisting of the sequence of any one of SEQ ID NOs: 3713-3748, or a nucleic acid sequence thereof having 3 or 4 nucleoside substitutions, additions, or deletions. In some embodiments, the sense strand further comprises a 3′ overhang. In some embodiments, the 3′ overhang comprises 1, 2, 3, 4, 5, 6, 7, 8, 9, or 10 nucleosides, or a range of nucleotides defined by any two of the aforementioned numbers. In some embodiments, the 3′ overhang comprises 1, 2, or more nucleosides. In some embodiments, the 3′ overhang comprises 2 nucleosides. In some embodiments, the sense strand further comprises a 5′ overhang. In some embodiments, the 5′ overhang comprises 1, 2, 3, 4, 5, 6, 7, 8, 9, or 10 nucleosides, or a range of nucleotides defined by any two of the aforementioned numbers. In some embodiments, the 5′ overhang comprises 1, 2, or more nucleosides. In some embodiments, the 5′ overhang comprises 2 nucleosides. In some embodiments, the sense strand comprises a nucleoside sequence comprising or consisting of the sequence of any one of SEQ ID NOs: 3713-3748, or a nucleic acid sequence thereof having 1 or 2 nucleoside additions at the 3′ end. In some embodiments, the composition comprises an oligonucleotide that inhibits the expression of FGG, wherein the oligonucleotide comprises an siRNA comprising a sense strand and an antisense strand, wherein the sense strand comprises a nucleoside sequence comprising or consisting of the sequence of any one of SEQ ID NOs: 3713-3748. In any of SEQ ID NOs: 3713-3748, thymine (T) may be replaced with Uracil (U).

[0036] In some embodiments, the composition comprises an oligonucleotide that inhibits the expression of FGG, wherein the oligonucleotide comprises an siRNA comprising a sense strand and an antisense strand, wherein the antisense strand comprises a nucleoside sequence comprising or consisting of the sequence of any one of SEQ ID NOs: 3749-3784, or a nucleic acid sequence thereof having 1 or 2 nucleoside substitutions, additions, or deletions. In some embodiments, the antisense strand sequence comprises a nucleoside sequence comprising or consisting of the sequence of any one of SEQ ID NOs: 3749-3784 or a nucleic acid sequence thereof having 3 or 4 nucleoside substitutions, additions, or deletions. In some embodiments, the antisense strand further comprises a 3′ overhang. In some embodiments, the 3′ overhang comprises 1, 2, 3, 4, 5, 6, 7, 8, 9, or 10 nucleosides, or a range of nucleotides defined by any two of the aforementioned numbers. In some embodiments, the 3′ overhang comprises 1, 2, or more nucleosides. In some embodiments, the 3′ overhang comprises 2 nucleosides. In some embodiments, the antisense strand further comprises a 5′ overhang. In some embodiments, the 5′ overhang comprises 1, 2, 3, 4, 5, 6, 7, 8, 9, or 10 nucleosides, or a range of nucleotides defined by any two of the aforementioned numbers. In some embodiments, the 5′ overhang comprises 1, 2, or more nucleosides. In some embodiments, the 5′ overhang comprises 2 nucleosides. In some embodiments, the antisense strand comprises a nucleoside sequence comprising or consisting of the sequence of any one of SEQ ID NOs: 3749-3784, or a nucleic acid sequence thereof having 1 or 2 nucleoside additions at the 3′ end. In some embodiments, the composition comprises an oligonucleotide that inhibits the expression of FGG, wherein the oligonucleotide comprises an siRNA comprising a sense strand and an antisense strand, wherein the antisense strand comprises a nucleoside sequence comprising or consisting of the sequence of any one of SEQ ID NOs: 3749-3784. In any of SEQ ID NOs: 3749-3784, thymine (T) may be replaced with Uracil (U).

[0037] In some embodiments, the sense and/or antisense strand comprises a nucleoside sequence at least 70% identical, at least 75% identical, at least 80% identical, at least 85% identical, at least 90% identical, or at least 95% identical, to a sense and/or antisense strand sequence in any of Tables 3-7. In some embodiments, the siRNA comprises the sense strand and/or the antisense strand sequence of an siRNA in any Tables 3-7, or a nucleic acid sequence thereof having 3 or 4 nucleoside substitutions, additions, or deletions. In some embodiments, the siRNA comprises the sense strand and/or the antisense strand sequence of an siRNA in any Tables 3-7, or a nucleic acid sequence thereof having 1 or 2 nucleoside substitutions, additions, or deletions. In some embodiments, the siRNA comprises the sense strand and/or the antisense strand sequence of an siRNA in any Tables 3-7. In some embodiments, the siRNA is cross-reactive with a non-human primate (NHP) FGG mRNA. The siRNA may include one or more internucleoside linkages and/or one or more nucleoside modifications.

[0038] In some embodiments, the siRNA comprises the sense strand and/or the antisense strand sequence of an siRNA of subset A, or a nucleic acid sequence thereof having 3 or 4 nucleoside substitutions, additions, or deletions. In some embodiments, the siRNA comprises the sense strand and/or the antisense strand sequence of an siRNA of subset A, or a nucleic acid sequence thereof having 1 or 2 nucleoside substitutions, additions, or deletions. In some embodiments, the siRNA comprises the sense strand and/or the antisense strand sequence of an siRNA of subset A. The siRNA may include one or more internucleoside linkages and/or one or more nucleoside modifications.

[0039] In some embodiments, the siRNA comprises the sense strand and/or the antisense strand sequence of an siRNA of subset B, or a nucleic acid sequence thereof having 3 or 4 nucleoside substitutions, additions, or deletions. In some embodiments, the siRNA comprises the sense strand and/or the antisense strand sequence of an siRNA of subset B, or a nucleic acid sequence thereof having 1 or 2 nucleoside substitutions, additions, or deletions. In some embodiments, the siRNA comprises the sense strand and/or the antisense strand sequence of an siRNA of subset B. The siRNA may include one or more internucleoside linkages and/or one or more nucleoside modifications.

[0040] In some embodiments, the siRNA comprises the sense strand and/or the antisense strand sequence of an siRNA of subset C, or a nucleic acid sequence thereof having 3 or 4 nucleoside substitutions, additions, or deletions. In some embodiments, the siRNA comprises the sense strand and/or the antisense strand sequence of an siRNA of subset C, or a nucleic acid sequence thereof having 1 or 2 nucleoside substitutions, additions, or deletions. In some embodiments, the siRNA comprises the sense strand and/or the antisense strand sequence of an siRNA of subset C. The siRNA may include one or more internucleoside linkages and/or one or more nucleoside modifications.

[0041] In some embodiments, the siRNA comprises the sense strand and/or the antisense strand sequence of an siRNA of subset D, or a nucleic acid sequence thereof having 3 or 4 nucleoside substitutions, additions, or deletions. In some embodiments, the siRNA comprises the sense strand and/or the antisense strand sequence of an siRNA of subset D, or a nucleic acid sequence thereof having 1 or 2 nucleoside substitutions, additions, or deletions. In some embodiments, the siRNA comprises the sense strand and/or the antisense strand sequence of an siRNA of subset D. The siRNA may include one or more internucleoside linkages and/or one or more nucleoside modifications.

[0042] In some embodiments, the siRNA comprises the sense strand and/or the antisense strand sequence of an siRNA of subset E, or a nucleic acid sequence thereof having 3 or 4 nucleoside substitutions, additions, or deletions. In some embodiments, the siRNA comprises the sense strand and/or the antisense strand sequence of an siRNA of subset E, or a nucleic acid sequence thereof having 1 or 2 nucleoside substitutions, additions, or deletions. In some embodiments, the siRNA comprises the sense strand and/or the antisense strand sequence of an siRNA of subset E. The siRNA may include one or more internucleoside linkages and/or one or more nucleoside modifications.

[0043] In some embodiments, the siRNA comprises the sense strand and/or the antisense strand sequence of an siRNA of subset G, or a nucleic acid sequence thereof having 3 or 4 nucleoside substitutions, additions, or deletions. In some embodiments, the siRNA comprises the sense strand and/or the antisense strand sequence of an siRNA of subset G, or a nucleic acid sequence thereof having 1 or 2 nucleoside substitutions, additions, or deletions. In some embodiments, the siRNA comprises the sense strand and/or the antisense strand sequence of an siRNA of subset G. The siRNA may include one or more internucleoside linkages and/or one or more nucleoside modifications.

[0044] In some embodiments, the sense strand comprises a nucleoside sequence at least 70% identical, at least 75% identical, at least 80% identical, at least 85% identical, at least 90% identical, or at least 95% identical, to any one of SEQ ID NOs: 352, 1003, 1011, or 1278. In some embodiments, the sense strand comprises the nucleoside sequence of any one of SEQ ID NOS: 352, 1003, 1011, or 1278, or a sense strand sequence thereof having 1 or 2 nucleoside substitutions, additions, or deletions. In some embodiments, the sense strand comprises the nucleoside sequence of any one of SEQ ID NOS: 352, 1003, 1011, or 1278, and 3 or 4 nucleoside substitutions, additions, or deletions. In some embodiments, the sense strand comprises the nucleoside sequence of any one of SEQ ID NOS: 352, 1003, 1011, or 1278. The sense strand may include any internucleoside linkages or nucleoside modifications described herein. The sense strand may include an overhang (e.g. 2 bases on a 5 or 3′ end when paired with an antisense strand). The sense strand may include a GalNAc moiety connected at one of the ends (e.g. 5′ end).

[0045] In some embodiments, the sense strand comprises a nucleoside sequence at least 85% identical to SEQ ID NO: 352. In some embodiments, the sense strand comprises the nucleoside sequence of SEQ ID NO: 352, or a sense strand sequence thereof having 1 or 2 nucleoside substitutions, additions, or deletions. In some embodiments, the sense strand comprises the nucleoside sequence of SEQ ID NO: 352, and 3 or 4 nucleoside substitutions, additions, or deletions. In some embodiments, the sense strand comprises the nucleoside sequence of SEQ ID NO: 352. The sense strand may include any internucleoside linkages or nucleoside modifications described herein. The sense strand may include an overhang (e.g. 2 bases on a 5 or 3′ end when paired with an antisense strand). The sense strand may include a GalNAc moiety connected at one of the ends (e.g. 5′ end).

[0046] In some embodiments, the sense strand comprises a nucleoside sequence at least 85% identical to SEQ ID NO: 1003. In some embodiments, the sense strand comprises the nucleoside sequence of SEQ ID NO: 1003, or a sense strand sequence thereof having 1 or 2 nucleoside substitutions, additions, or deletions. In some embodiments, the sense strand comprises the nucleoside sequence of SEQ ID NO: 1003, and 3 or 4 nucleoside substitutions, additions, or deletions. In some embodiments, the sense strand comprises the nucleoside sequence of SEQ ID NO: 1003. The sense strand may include any internucleoside linkages or nucleoside modifications described herein. The sense strand may include an overhang (e.g. 2 bases on a 5 or 3′ end when paired with an antisense strand). The sense strand may include a GalNAc moiety connected at one of the ends (e.g. 5′ end).

[0047] In some embodiments, the sense strand comprises a nucleoside sequence at least 85% identical to SEQ ID NO: 1011. In some embodiments, the sense strand comprises the nucleoside sequence of SEQ ID NO: 1011, or a sense strand sequence thereof having 1 or 2 nucleoside substitutions, additions, or deletions. In some embodiments, the sense strand comprises the nucleoside sequence of SEQ ID NO: 1011, and 3 or 4 nucleoside substitutions, additions, or deletions. In some embodiments, the sense strand comprises the nucleoside sequence of SEQ ID NO: 1011. The sense strand may include any internucleoside linkages or nucleoside modifications described herein. The sense strand may include an overhang (e.g. 2 bases on a 5 or 3′ end when paired with an antisense strand). The sense strand may include a GalNAc moiety connected at one of the ends (e.g. 5′ end).

[0048] In some embodiments, the sense strand comprises a nucleoside sequence at least 85% identical to SEQ ID NO: 1278. In some embodiments, the sense strand comprises the nucleoside sequence of SEQ ID NO: 1278, or a sense strand sequence thereof having 1 or 2 nucleoside substitutions, additions, or deletions. In some embodiments, the sense strand comprises the nucleoside sequence of SEQ ID NO: 1278, and 3 or 4 nucleoside substitutions, additions, or deletions. In some embodiments, the sense strand comprises the nucleoside sequence of SEQ ID NO: 1278. The sense strand may include any internucleoside linkages or nucleoside modifications described herein. The sense strand may include an overhang (e.g. 2 bases on a 5 or 3′ end when paired with an antisense strand). The sense strand may include a GalNAc moiety connected at one of the ends (e.g. 5′ end).

[0049] In some embodiments, the antisense strand comprises a nucleoside sequence at least 70% identical, at least 75% identical, at least 80% identical, at least 85% identical, at least 90% identical, or at least 95% identical, to any one of SEQ ID NOs: 2094, 2745, 2753, or 3020. In some embodiments, the antisense strand comprises the nucleoside sequence of any one of SEQ ID NOS: 2094, 2745, 2753, or 3020, or an antisense strand sequence thereof having 1 or 2 nucleoside substitutions, additions, or deletions. In some embodiments, the antisense strand comprises the nucleoside sequence of any one of SEQ ID NOS: 2094, 2745, 2753, or 3020, and 3 or 4 nucleoside substitutions, additions, or deletions. In some embodiments, the antisense strand comprises the nucleoside sequence of any one of SEQ ID NOS: 2094, 2745, 2753, or 3020. The antisense strand may include any internucleoside linkages or nucleoside modifications described herein. The antisense strand may include an overhang (e.g. 2 bases on a 5 or 3′ end when paired with a sense strand). The antisense strand may include a GalNAc moiety connected at one of the ends (e.g. 5′ end or 3′ end).

[0050] In some embodiments, the antisense strand comprises a nucleoside sequence at least 85% identical to SEQ ID NO: 2094. In some embodiments, the antisense strand comprises the nucleoside sequence of SEQ ID NO: 2094, or an antisense strand sequence thereof having 1 or 2 nucleoside substitutions, additions, or deletions. In some embodiments, the antisense strand comprises the nucleoside sequence of SEQ ID NO: 2094, and 3 or 4 nucleoside substitutions, additions, or deletions. In some embodiments, the antisense strand comprises the nucleoside sequence of SEQ ID NO: 2094. The antisense strand may include any internucleoside linkages or nucleoside modifications described herein. The antisense strand may include an overhang (e.g. 2 bases on a 5 or 3′ end when paired with a sense strand). The sense strand may include a GalNAc moiety connected at one of the ends.

[0051] In some embodiments, the antisense strand comprises a nucleoside sequence at least 85% identical to SEQ ID NO: 2745. In some embodiments, the antisense strand comprises the nucleoside sequence of SEQ ID NO: 2745, or an antisense strand sequence thereof having 1 or 2 nucleoside substitutions, additions, or deletions. In some embodiments, the antisense strand comprises the nucleoside sequence of SEQ ID NO: 2745, and 3 or 4 nucleoside substitutions, additions, or deletions. In some embodiments, the antisense strand comprises the nucleoside sequence of SEQ ID NO: 2745. The antisense strand may include any internucleoside linkages or nucleoside modifications described herein. The antisense strand may include an overhang (e.g. 2 bases on a 5 or 3′ end when paired with a sense strand). The sense strand may include a GalNAc moiety connected at one of the ends.

[0052] In some embodiments, the antisense strand comprises a nucleoside sequence at least 85% identical to SEQ ID NO: 2753. In some embodiments, the antisense strand comprises the nucleoside sequence of SEQ ID NO: 2753, or an antisense strand sequence thereof having 1 or 2 nucleoside substitutions, additions, or deletions. In some embodiments, the antisense strand comprises the nucleoside sequence of SEQ ID NO: 2753, and 3 or 4 nucleoside substitutions, additions, or deletions. In some embodiments, the antisense strand comprises the nucleoside sequence of SEQ ID NO: 2753. The antisense strand may include any internucleoside linkages or nucleoside modifications described herein. The antisense strand may include an overhang (e.g. 2 bases on a 5 or 3′ end when paired with a sense strand). The sense strand may include a GalNAc moiety connected at one of the ends.

[0053] In some embodiments, the antisense strand comprises a nucleoside sequence at least 85% identical to SEQ ID NO: 3020. In some embodiments, the antisense strand comprises the nucleoside sequence of SEQ ID NO: 3020, or an antisense strand sequence thereof having 1 or 2 nucleoside substitutions, additions, or deletions. In some embodiments, the antisense strand comprises the nucleoside sequence of SEQ ID NO: 3020, and 3 or 4 nucleoside substitutions, additions, or deletions. In some embodiments, the antisense strand comprises the nucleoside sequence of SEQ ID NO: 3020. The antisense strand may include any internucleoside linkages or nucleoside modifications described herein. The antisense strand may include an overhang (e.g. 2 bases on a 5 or 3′ end when paired with a sense strand). The sense strand may include a GalNAc moiety connected at one of the ends.

[0054] In some embodiments, the sense strand comprises a nucleoside sequence at least 70% identical, at least 75% identical, at least 80% identical, at least 85% identical, at least 90% identical, or at least 95% identical, to any one of SEQ ID NOs: 3723, 3724, 3726, or 3747. In some embodiments, the sense strand comprises the nucleoside sequence of any one of SEQ ID NOS: 3723, 3724, 3726, or 3747, or a sense strand sequence thereof having 1 or 2 nucleoside substitutions, additions, or deletions. In some embodiments, the sense strand comprises the nucleoside sequence of any one of SEQ ID NOS: 3723, 3724, 3726, or 3747, and 3 or 4 nucleoside substitutions, additions, or deletions. In some embodiments, the sense strand comprises the nucleoside sequence of any one of SEQ ID NOS: 3723, 3724, 3726, or 3747. The sense strand may include any internucleoside linkages or nucleoside modifications described herein. The sense strand may include an overhang (e.g. 2 bases on a 5 or 3′ end when paired with an antisense strand). The sense strand may include a GalNAc moiety connected at one of the ends (e.g. 5′ end).

[0055] In some embodiments, the sense strand comprises a nucleoside sequence at least 85% identical to SEQ ID NO: 3723. In some embodiments, the sense strand comprises the nucleoside sequence of SEQ ID NO: 3723, or a sense strand sequence thereof having 1 or 2 nucleoside substitutions, additions, or deletions. In some embodiments, the sense strand comprises the nucleoside sequence of SEQ ID NO: 3723, and 3 or 4 nucleoside substitutions, additions, or deletions. In some embodiments, the sense strand comprises the nucleoside sequence of SEQ ID NO: 3723. The sense strand may include any internucleoside linkages or nucleoside modifications described herein. The sense strand may include an overhang (e.g. 2 bases on a 5 or 3′ end when paired with an antisense strand). The sense strand may include a GalNAc moiety connected at one of the ends (e.g. 5′ end).

[0056] In some embodiments, the sense strand comprises a nucleoside sequence at least 85% identical to SEQ ID NO: 3724. In some embodiments, the sense strand comprises the nucleoside sequence of SEQ ID NO: 3724, or a sense strand sequence thereof having 1 or 2 nucleoside substitutions, additions, or deletions. In some embodiments, the sense strand comprises the nucleoside sequence of SEQ ID NO: 3724, and 3 or 4 nucleoside substitutions, additions, or deletions. In some embodiments, the sense strand comprises the nucleoside sequence of SEQ ID NO: 3724. The sense strand may include any internucleoside linkages or nucleoside modifications described herein. The sense strand may include an overhang (e.g. 2 bases on a 5 or 3′ end when paired with an antisense strand). The sense strand may include a GalNAc moiety connected at one of the ends (e.g. 5′ end).

[0057] In some embodiments, the sense strand comprises a nucleoside sequence at least 85% identical to SEQ ID NO: 3726. In some embodiments, the sense strand comprises the nucleoside sequence of SEQ ID NO: 3726, or a sense strand sequence thereof having 1 or 2 nucleoside substitutions, additions, or deletions. In some embodiments, the sense strand comprises the nucleoside sequence of SEQ ID NO: 3726, and 3 or 4 nucleoside substitutions, additions, or deletions. In some embodiments, the sense strand comprises the nucleoside sequence of SEQ ID NO: 3726. The sense strand may include any internucleoside linkages or nucleoside modifications described herein. The sense strand may include an overhang (e.g. 2 bases on a 5 or 3′ end when paired with an antisense strand). The sense strand may include a GalNAc moiety connected at one of the ends (e.g. 5′ end).

[0058] In some embodiments, the sense strand comprises a nucleoside sequence at least 85% identical to SEQ ID NO: 3747. In some embodiments, the sense strand comprises the nucleoside sequence of SEQ ID NO: 3747, or a sense strand sequence thereof having 1 or 2 nucleoside substitutions, additions, or deletions. In some embodiments, the sense strand comprises the nucleoside sequence of SEQ ID NO: 3747, and 3 or 4 nucleoside substitutions, additions, or deletions. In some embodiments, the sense strand comprises the nucleoside sequence of SEQ ID NO: 3747. The sense strand may include any internucleoside linkages or nucleoside modifications described herein. The sense strand may include an overhang (e.g. 2 bases on a 5 or 3′ end when paired with an antisense strand). The sense strand may include a GalNAc moiety connected at one of the ends (e.g. 5′ end).

[0059] In some embodiments, the antisense strand comprises a nucleoside sequence at least 70% identical, at least 75% identical, at least 80% identical, at least 85% identical, at least 90% identical, or at least 95% identical, to any one of SEQ ID NOs: 3759, 3760, 3762, or 3783. In some embodiments, the antisense strand comprises the nucleoside sequence of any one of SEQ ID NOS: 3759, 3760, 3762, or 3783, or an antisense strand sequence thereof having 1 or 2 nucleoside substitutions, additions, or deletions. In some embodiments, the antisense strand comprises the nucleoside sequence of any one of SEQ ID NOS: 3759, 3760, 3762, or 3783, and 3 or 4 nucleoside substitutions, additions, or deletions. In some embodiments, the antisense strand comprises the nucleoside sequence of any one of SEQ ID NOS: 3759, 3760, 3762, or 3783. The antisense strand may include any internucleoside linkages or nucleoside modifications described herein. The antisense strand may include an overhang (e.g. 2 bases on a 5 or 3′ end when paired with a sense strand). The antisense strand may include a GalNAc moiety connected at one of the ends (e.g. 5′ end or 3′ end).

[0060] In some embodiments, the antisense strand comprises a nucleoside sequence at least 85% identical to SEQ ID NO: 3759. In some embodiments, the antisense strand comprises the nucleoside sequence of SEQ ID NO: 3759, or an antisense strand sequence thereof having 1 or 2 nucleoside substitutions, additions, or deletions. In some embodiments, the antisense strand comprises the nucleoside sequence of SEQ ID NO: 3759, and 3 or 4 nucleoside substitutions, additions, or deletions. In some embodiments, the antisense strand comprises the nucleoside sequence of SEQ ID NO: 3759. The antisense strand may include any internucleoside linkages or nucleoside modifications described herein. The antisense strand may include an overhang (e.g. 2 bases on a 5 or 3′ end when paired with a sense strand). The sense strand may include a GalNAc moiety connected at one of the ends.

[0061] In some embodiments, the antisense strand comprises a nucleoside sequence at least 85% identical to SEQ ID NO: 3760. In some embodiments, the antisense strand comprises the nucleoside sequence of SEQ ID NO: 3760, or an antisense strand sequence thereof having 1 or 2 nucleoside substitutions, additions, or deletions. In some embodiments, the antisense strand comprises the nucleoside sequence of SEQ ID NO: 3760, and 3 or 4 nucleoside substitutions, additions, or deletions. In some embodiments, the antisense strand comprises the nucleoside sequence of SEQ ID NO: 3760. The antisense strand may include any internucleoside linkages or nucleoside modifications described herein. The antisense strand may include an overhang (e.g. 2 bases on a 5 or 3′ end when paired with a sense strand). The sense strand may include a GalNAc moiety connected at one of the ends.

[0062] In some embodiments, the antisense strand comprises a nucleoside sequence at least 85% identical to SEQ ID NO: 3762. In some embodiments, the antisense strand comprises the nucleoside sequence of SEQ ID NO: 3762, or an antisense strand sequence thereof having 1 or 2 nucleoside substitutions, additions, or deletions. In some embodiments, the antisense strand comprises the nucleoside sequence of SEQ ID NO: 3762, and 3 or 4 nucleoside substitutions, additions, or deletions. In some embodiments, the antisense strand comprises the nucleoside sequence of SEQ ID NO: 3762. The antisense strand may include any internucleoside linkages or nucleoside modifications described herein. The antisense strand may include an overhang (e.g. 2 bases on a 5 or 3′ end when paired with a sense strand). The sense strand may include a GalNAc moiety connected at one of the ends.

[0063] In some embodiments, the antisense strand comprises a nucleoside sequence at least 85% identical to SEQ ID NO: 3783. In some embodiments, the antisense strand comprises the nucleoside sequence of SEQ ID NO: 3783, or an antisense strand sequence thereof having 1 or 2 nucleoside substitutions, additions, or deletions. In some embodiments, the antisense strand comprises the nucleoside sequence of SEQ ID NO: 3783, and 3 or 4 nucleoside substitutions, additions, or deletions. In some embodiments, the antisense strand comprises the nucleoside sequence of SEQ ID NO: 3783. The antisense strand may include any internucleoside linkages or nucleoside modifications described herein. The antisense strand may include an overhang (e.g. 2 bases on a 5 or 3′ end when paired with a sense strand). The sense strand may include a GalNAc moiety connected at one of the ends.

### B. ASOs

[0064] In some embodiments, the composition comprises an oligonucleotide that inhibits the expression of FGG, wherein the oligonucleotide comprises an antisense oligonucleotide (ASO). In some embodiments, the ASO is 12-30 nucleosides in length. In some embodiments, the ASO is 14-30 nucleosides in length. In some embodiments, the ASO is at least about 10, 11, 12, 13, 14, 15, 16, 17, 18, 19, 20, 21, 22, 23, 24, 25, 26, 27, 28, 29, or 30 nucleosides in length, or a range defined by any of the two aforementioned numbers. In some embodiments, the ASO is 15-25 nucleosides in length. In some embodiments, the ASO is 20 nucleosides in length.

[0065] In some embodiments, the composition comprises an oligonucleotide that inhibits the expression of FGG, wherein the oligonucleotide comprises an ASO about 12-30 nucleosides in length and comprising a nucleoside sequence complementary to about 12-30 contiguous nucleosides of a full-length human FGG mRNA sequence such as SEQ ID NO: 3621; wherein (i) the oligonucleotide comprises a modification comprising a modified nucleoside and/or a modified internucleoside linkage, and/or (ii) the composition comprises a pharmaceutically acceptable carrier. In some embodiments, the ASO comprise a nucleoside sequence complementary to at least about 10, 11, 12, 13, 14, 15, 16, 17, 18, 19, 20, 21, 22, 23, 24, 25, 26, 27, 28, 29, 30, or more contiguous nucleosides of one of SEQ ID NO: 3621.

### C. Modification Patterns

[0066] In some embodiments, the composition comprises an oligonucleotide that inhibits the expression of FGG, wherein the oligonucleotide comprises a modification comprising a modified nucleoside and/or a modified internucleoside linkage, and/or (ii) the composition comprises a pharmaceutically acceptable carrier. In some embodiments, the oligonucleotide comprises a modification comprising a modified nucleoside and/or a modified internucleoside linkage. In some embodiments, the oligonucleotide comprises a modified internucleoside linkage. In some embodiments, the modified internucleoside linkage comprises alkylphosphonate, phosphorothioate, methylphosphonate, phosphorodithioate, alkylphosphonothioate, phosphoramidate, carbamate, carbonate, phosphate triester, acetamidate, or carboxymethyl ester, or a combination thereof. In some embodiments, the modified internucleoside linkage comprises one or more phosphorothioate linkages. A phosphorothioate may include a nonbridging oxygen atom in a phosphate backbone of the oligonucleotide that is replaced by sulfur. Modified internucleoside linkages may be included in siRNAs or ASOs. Benefits of the modified internucleoside linkage may include decreased toxicity or improved pharmacokinetics.

[0067] In some embodiments, the composition comprises an oligonucleotide that inhibits the expression of FGG, wherein the oligonucleotide comprises a modified internucleoside linkage, wherein the oligonucleotide comprises 1, 2, 3, 4, 5, 6, 7, 8, 9, 10, 11, 12, 13, 14, 15, 16, 17, 18, 19, or 20 modified internucleoside linkages, or a range of modified internucleoside linkages defined by any two of the aforementioned numbers. In some embodiments, the oligonucleotide comprises no more than 18 modified internucleoside linkages. In some embodiments, the oligonucleotide comprises no more than 20 modified internucleoside linkages. In some embodiments, the oligonucleotide comprises 2 or more modified internucleoside linkages, 3 or more modified internucleoside linkages, 4 or more modified internucleoside linkages, 5 or more modified internucleoside linkages, 6 or more modified internucleoside linkages, 7 or more modified internucleoside linkages, 8 or more modified internucleoside linkages, 9 or more modified internucleoside linkages, 10 or more modified internucleoside linkages, 11 or more modified internucleoside linkages, 12 or more modified internucleoside linkages, 13 or more modified internucleoside linkages, 14 or more modified internucleoside linkages, 15 or more modified internucleoside linkages, 16 or more modified internucleoside linkages, 17 or more modified internucleoside linkages, 18 or more modified internucleoside linkages, 19 or more modified internucleoside linkages, or 20 or more modified internucleoside linkages.

[0068] In some embodiments, the composition comprises an oligonucleotide that inhibits the expression of FGG, wherein the oligonucleotide comprises the modified nucleoside. In some embodiments, the modified nucleoside comprises a locked nucleic acid (LNA), hexitol nucleic acid (HLA), cyclohexene nucleic acid (CeNA), 2′-methoxyethyl, 2′-O-alkyl, 2-O-allyl, 2′-fluoro, or 2′-deoxy, or a combination thereof. In some embodiments, the modified nucleoside comprises a LNA. In some embodiments, the modified nucleoside comprises a 2′,4′ constrained ethyl nucleic acid. In some embodiments, the modified nucleoside comprises HLA. In some embodiments, the modified nucleoside comprises CeNA. In some embodiments, the modified nucleoside comprises a 2′-methoxyethyl group. In some embodiments, the modified nucleoside comprises a 2′-O-alkyl group. In some embodiments, the modified nucleoside comprises a 2′-O-allyl group. In some embodiments, the modified nucleoside comprises a 2′-fluoro group. In some embodiments, the modified nucleoside comprises a 2′-deoxy group. In some embodiments, the modified nucleoside comprises a 2′-O-methyl nucleoside, 2′-deoxyfluoro nucleoside, 2′-O—N-methylacetamido (2′-O-NMA) nucleoside, a 2′-O-dimethylaminoethoxyethyl (2′-O-DMAEOE) nucleoside, 2′-O-aminopropyl (2′-O-AP) nucleoside, or 2′-ara-F, or a combination thereof. In some embodiments, the modified nucleoside comprises a 2′-O-methyl nucleoside. In some embodiments, the modified nucleoside comprises a 2′-deoxyfluoro nucleoside. In some embodiments, the modified nucleoside comprises a 2′-O-NMA nucleoside. In some embodiments, the modified nucleoside comprises a 2′-O-DMAEOE nucleoside. In some embodiments, the modified nucleoside comprises a 2′-O-aminopropyl (2′-O-AP) nucleoside. In some embodiments, the modified nucleoside comprises 2′-ara-F. In some embodiments, the modified nucleoside comprises one or more 2′fluoro modified nucleosides. In some embodiments, the modified nucleoside comprises a 2′ O-alkyl modified nucleoside. Benefits of the modified nucleoside may include decreased toxicity or improved pharmacokinetics.

[0069] In some embodiments, the oligonucleotide comprises 1, 2, 3, 4, 5, 6, 7, 8, 9, 10, 11, 12, 13, 14, 15, 16, 17, 18, 19, 20, or 21 modified nucleosides, or a range of nucleosides defined by any two of the aforementioned numbers. In some embodiments, the oligonucleotide comprises no more than 19 modified nucleosides. In some embodiments, the oligonucleotide comprises no more than 21 modified nucleosides. In some embodiments, the oligonucleotide comprises 2 or more modified nucleosides, 3 or more modified nucleosides, 4 or more modified nucleosides, 5 or more modified nucleosides, 6 or more modified nucleosides, 7 or more modified nucleosides, 8 or more modified nucleosides, 9 or more modified nucleosides, 10 or more modified nucleosides, 11 or more modified nucleosides, 12 or more modified nucleosides, 13 or more modified nucleosides, 14 or more modified nucleosides, 15 or more modified nucleosides, 16 or more modified nucleosides, 17 or more modified nucleosides, 18 or more modified nucleosides, 19 or more modified nucleosides, 20 or more modified nucleosides, or 21 or more modified nucleosides.

[0070] In some embodiments, the composition comprises an oligonucleotide that inhibits the expression of FGG, wherein the oligonucleotide comprises a moiety attached at a 3′ or 5′ terminus of the oligonucleotide. Examples of moieties include a hydrophobic moiety or a sugar moiety, or a combination thereof. In some embodiments, the oligonucleotide is an siRNA having a sense strand, and the moiety is attached to a 5′ end of the sense strand. In some embodiments, the oligonucleotide is an siRNA having a sense strand, and the moiety is attached to a 3′ end of the sense strand. In some embodiments, the oligonucleotide is an siRNA having an antisense strand, and the moiety is attached to a 5′ end of the antisense strand. In some embodiments, the oligonucleotide is an siRNA having an antisense strand, and the moiety is attached to a 3′ end of the antisense strand. In some embodiments, the oligonucleotide is an ASO, and the moiety is attached to a 5′ end of the ASO. In some embodiments, the oligonucleotide is an ASO, and the moiety is attached to a 3′ end of the ASO.

[0071] In some embodiments, the composition comprises an oligonucleotide that inhibits the expression of FGG, wherein the oligonucleotide comprises a hydrophobic moiety. The hydrophobic moiety may be attached at a 3′ or 5′ terminus of the oligonucleotide. The hydrophobic moiety may include a lipid such as a fatty acid. The hydrophobic moiety may include a hydrocarbon. The hydrocarbon may be linear. The hydrocarbon may be non-linear. The hydrophobic moiety may include a lipid moiety or a cholesterol moiety, or a combination thereof.

[0072] In some embodiments, the composition comprises an oligonucleotide that inhibits the expression of FGG, wherein the oligonucleotide comprises a lipid attached at a 3′ or 5′ terminus of the oligonucleotide. In some embodiments, the lipid comprises cholesterol, myristoyl, palmitoyl, stearoyl, lithocholoyl, docosanoyl, docosahexaenoyl, myristyl, palmityl stearyl, or α-tocopherol, or a combination thereof.

[0073] In some embodiments, the composition comprises an oligonucleotide that inhibits the expression of FGG, wherein the oligonucleotide comprises a sugar moiety. The sugar moiety may include an N-acetyl galactose moiety (e.g. a N-acetylgalactosamine (GalNAc) moiety), an N-acetyl glucose moiety (e.g. an N-acetylglucosamine (GlcNAc) moiety), a fucose moiety, or a mannose moiety. The sugar moiety may include 1, 2, 3, or more sugar molecules. The sugar moiety may be attached at a 3′ or 5′ terminus of the oligonucleotide. The sugar moiety may include an N-acetyl galactose moiety. The sugar moiety may include an N-acetylgalactosamine (GalNAc) moiety. The sugar moiety may include an N-acetyl glucose moiety. The sugar moiety may include N-acetylglucosamine (GlcNAc) moiety. The sugar moiety may include a fucose moiety. The sugar moiety may include a mannose moiety. N-acetyl glucose, GlcNAc, fucose, or mannose may be useful for targeting macrophages since they may target or bind a mannose receptor such as CD206.

[0074] In some embodiments, the composition comprises an oligonucleotide that inhibits the expression of FGG, wherein the oligonucleotide comprises an N-acetylgalactosamine (GalNAc) moiety. GalNAc may be useful for hepatocyte targeting, neural (e.g., CNS (e.g., brain), or CSF targeting. The GalNAc moiety may include 1, 2, 3, or more GalNAc molecules. The GalNAc moiety may be attached at a 3′ or 5′ terminus of the oligonucleotide.

[0075] Non-limiting examples of GalNAc ligands are shown in FIG. 1 and FIG. 2. In some embodiments, the oligonucleotide is conjugated to the GalNAc ligand in FIG. 1. In the GalNAc ligand shown in FIG. 1, J indicates a point of attachment to an oligonucleotide. In some embodiments, J is at a 5′ end of the oligonucleotide. In some embodiments, J is at a 3′ end of the oligonucleotide. In the GalNAc ligand shown in FIG. 1, n may be any number. For example, n may be 1-10. In some embodiments, n is 1, 2, 3, 4, 5, 6, 7, 8, 9, or 10, or a range defined by any two of the aforementioned integers. In some embodiments, n is 2. In embodiments in which n is 2 and the oligonucleotide is connected at J, the GalNAc moiety may be referred to as “GalNAc #1” or “GalNAc1.”

[0076] In some embodiments, the oligonucleotide is conjugated to the GalNAc ligand in FIG. 2. The wavy line in FIG. 1 indicates a point of attachment to an oligonucleotide. In some embodiments, the wavy line is at a 5′ end of the oligonucleotide. In some embodiments, the wavy line is at a 3′ end of the oligonucleotide. In embodiments in which the oligonucleotide is connected at the wavy line, the GalNAc moiety may be referred to as “GalNAc #23” or “GalNAc23.”

[0077] The oligonucleotide may include purines. Examples of purines include adenine (A) or guanine (G), or modified versions thereof. The oligonucleotide may include pyrimidines. Examples of pyrimidines include cytosine (C), thymine (T), or uracil (U), or modified versions thereof.

[0078] In some embodiments, purines of the oligonucleotide comprise 2′ fluoro modified purines. In some embodiments, purines of the oligonucleotide comprise 2′-O-methyl modified purines. In some embodiments, purines of the oligonucleotide comprise a mixture of 2′ fluoro and 2′-O-methyl modified purines. In some embodiments, all purines of the oligonucleotide comprise 2′ fluoro modified purines. In some embodiments, all purines of the oligonucleotide comprise 2′-O-methyl modified purines. In some embodiments, all purines of the oligonucleotide comprise a mixture of 2′ fluoro and 2′-O-methyl modified purines. 2′-O-methyl may include 2′ O-methyl. Where 2′-O-methyl modifications are described, it is contemplated that a 2′-methyl modification may be included, and vice versa.

[0079] In some embodiments, pyrimidines of the oligonucleotide comprise 2′ fluoro modified pyrimidines. In some embodiments, pyrimidines of the oligonucleotide comprise 2′-O-methyl modified pyrimidines. In some embodiments, pyrimidines of the oligonucleotide comprise a mixture of 2′ fluoro and 2′-O-methyl modified pyrimidines. In some embodiments, all pyrimidines of the oligonucleotide comprise 2′ fluoro modified pyrimidines. In some embodiments, all pyrimidines of the oligonucleotide comprise 2′-O-methyl modified pyrimidines. In some embodiments, all pyrimidines of the oligonucleotide comprise a mixture of 2′ fluoro and 2′-O-methyl modified pyrimidines.

[0080] In some embodiments, purines of the oligonucleotide comprise 2′ fluoro modified purines, and pyrimidines of the oligonucleotide comprise a mixture of 2′ fluoro and 2′-O-methyl modified pyrimidines. In some embodiments, purines of the oligonucleotide comprise 2′-O-methyl modified purines, and pyrimidines of the oligonucleotide comprise a mixture of 2′ fluoro and 2′-O-methyl modified pyrimidines. In some embodiments, purines of the oligonucleotide comprise 2′ fluoro modified purines, and pyrimidines of the oligonucleotide comprise 2′-O-methyl modified pyrimidines. In some embodiments, purines of the oligonucleotide comprise 2′-O-methyl modified purines, and pyrimidines of the oligonucleotide comprise 2′ fluoro modified pyrimidines. In some embodiments, pyrimidines of the oligonucleotide comprise 2′ fluoro modified pyrimidines, and purines of the oligonucleotide comprise a mixture of 2′ fluoro and 2′-O-methyl modified purines. In some embodiments, pyrimidines of the oligonucleotide comprise 2′-O-methyl modified pyrimidines, and purines of the oligonucleotide comprise a mixture of 2′ fluoro and 2′-O-methyl modified purines. In some embodiments, pyrimidines of the oligonucleotide comprise 2′ fluoro modified pyrimidines, and purines of the oligonucleotide comprise 2′-O-methyl modified purines. In some embodiments, pyrimidines of the oligonucleotide comprise 2′-O-methyl modified pyrimidines, and purines of the oligonucleotide comprise 2′ fluoro modified purines.

[0081] In some embodiments, all purines of the oligonucleotide comprise 2′ fluoro modified purines, and all pyrimidines of the oligonucleotide comprise a mixture of 2′ fluoro and 2′-O-methyl modified pyrimidines. In some embodiments, all purines of the oligonucleotide comprise 2′-O-methyl modified purines, and all pyrimidines of the oligonucleotide comprise a mixture of 2′ fluoro and 2′-O-methyl modified pyrimidines. In some embodiments, all purines of the oligonucleotide comprise 2′ fluoro modified purines, and all pyrimidines of the oligonucleotide comprise 2′-O-methyl modified pyrimidines. In some embodiments, all purines of the oligonucleotide comprise 2′-O-methyl modified purines, and all pyrimidines of the oligonucleotide comprise 2′ fluoro modified pyrimidines. In some embodiments, all pyrimidines of the oligonucleotide comprise 2′ fluoro modified pyrimidines, and all purines of the oligonucleotide comprise a mixture of 2′ fluoro and 2′-O-methyl modified purines. In some embodiments, all pyrimidines of the oligonucleotide comprise 2′-O-methyl modified pyrimidines, and all purines of the oligonucleotide comprise a mixture of 2′ fluoro and 2′-O-methyl modified purines. In some embodiments, all pyrimidines of the oligonucleotide comprise 2′ fluoro modified pyrimidines, and all purines of the oligonucleotide comprise 2′-O-methyl modified purines. In some embodiments, all pyrimidines of the oligonucleotide comprise 2′-O-methyl modified pyrimidines, and all purines of the oligonucleotide comprise 2′ fluoro modified purines.

[0082] In some cases, the oligonucleotide comprises a particular modification pattern. In some embodiments, position 9 counting from the 5′ end of the of a strand of the oligonucleotide may have a 2′F modification. In some embodiments, when position 9 of a strand of the oligonucleotide is a pyrimidine, then all purines in a strand of the oligonucleotide have a 2′OMe modification. In some embodiments, when position 9 is the only pyrimidine between positions 5 and 11 of the sense stand, then position 9 is the only position with a 2′F modification in a strand of the oligonucleotide. In some embodiments, when position 9 and only one other base between positions 5 and 11 of a strand of the oligonucleotide are pyrimidines, then both of these pyrimidines are the only two positions with a 2′F modification in a strand of the oligonucleotide. In some embodiments, when position 9 and only two other bases between positions 5 and 11 of a strand of the oligonucleotide are pyrimidines, and those two other pyrimidines are in adjacent positions so that there would be not three 2′F modifications in a row, then any combination of 2′F modifications can be made that give three 2′F modifications in total. In some embodiments, when there are more than 2 pyrimidines between positions 5 and 11 of a strand of the oligonucleotide, then all combinations of pyrimidines having the 2′F modification are allowed that have three to five 2′F modifications in total, provided that a strand of the oligonucleotide does not have three 2′F modifications in a row. In some cases, a strand of the oligonucleotide of any of the siRNAs comprises a modification pattern which conforms to any or all of these a strand of the oligonucleotide rules.

[0083] In some embodiments, when position 9 of a strand of the oligonucleotide is a purine, then all purines in a strand of the oligonucleotide have a 2′OMe modification. In some embodiments, when position 9 is the only purine between positions 5 and 11 of the sense stand, then position 9 is the only position with a 2′F modification in a strand of the oligonucleotide. In some embodiments, when position 9 and only one other base between positions 5 and 11 of a strand of the oligonucleotide are purines, then both of these purines are the only two positions with a 2′F modification in a strand of the oligonucleotide. In some embodiments, when position 9 and only two other bases between positions 5 and 11 of a strand of the oligonucleotide are purines, and those two other purines are in adjacent positions so that there would be not three 2′F modifications in a row, then any combination of 2′F modifications can be made that give three 2′F modifications in total. In some embodiments, when there are more than 2 purines between positions 5 and 11 of a strand of the oligonucleotide, then all combinations of purines having the 2′F modification are allowed that have three to five 2′F modifications in total, provided that a strand of the oligonucleotide does not have three 2′F modifications in a row. In some cases, a strand of the oligonucleotide of any of the siRNAs comprises a modification pattern which conforms to any or all of these a strand of the oligonucleotide rules.

[0084] In some cases, position 9 of a strand of the oligonucleotide can be a 2′deoxy. In these cases, 2′F and 2′OMe modifications may occur at the other positions of a strand of the oligonucleotide. In some cases, a strand of the oligonucleotide of any of the siRNAs comprises a modification pattern which conforms to these a strand of the oligonucleotide rules.

[0085] In some embodiments, position nine of the sense strand comprises a 2′ fluoro-modified pyrimidine. In some embodiments, all purines of the sense strand comprise 2′-O-methyl modified purines. In some embodiments, 1, 2, 3, 4, or 5 pyrimidines between positions 5 and 11 comprise a 2′flouro-modified pyrimidine, provided there are not three 2′ fluoro-modified pyrimidines in a row. In some embodiments, the odd-numbered positions of the antisense strand comprise 2′-O-methyl modified nucleotides. In some embodiments, the even-numbered positions of the antisense strand comprise 2′flouro-modified nucleotides and unmodified deoxyribonucleotide. In some embodiments, the even-numbered positions of the antisense strand comprise 2′flouro-modified nucleotides, 2′-O-methyl modified nucleotides and unmodified deoxyribonucleotide. In some embodiments, position nine of the sense strand comprises a 2′ fluoro-modified pyrimidine; all purines of the sense strand comprises 2′-O-methyl modified purines; 1, 2, 3, 4, or 5 pyrimidines between positions 5 and 11 comprise a 2′flouro-modified pyrimidine, provided there are not three 2′ fluoro-modified pyrimidines in a row; the odd-numbered positions of the antisense strand comprise 2′-O-methyl modified nucleotides; and the even-numbered positions of the antisense strand comprise 2′flouro-modified nucleotides and unmodified deoxyribonucleotides.

[0086] In some embodiments, position nine of the sense strand comprises a 2′ fluoro-modified purine. In some embodiments, all pyrimidines of the sense strand comprise 2′-O-methyl modified purines. In some embodiments, 1, 2, 3, 4, or 5 purines between positions 5 and 11 comprise a 2′flouro-modified purine, provided there are not three 2′ fluoro-modified purine in a row. In some embodiments, the odd-numbered positions of the antisense strand comprise 2′-O-methyl modified nucleotides. In some embodiments, the even-numbered positions of the antisense strand comprise 2′flouro-modified nucleotides and unmodified deoxyribonucleotide. In some embodiments, the even-numbered positions of the antisense strand comprise 2′flouro-modified nucleotides, 2′-O-methyl modified nucleotides and unmodified deoxyribonucleotide. In some embodiments, position nine of the sense strand comprises a 2′ fluoro-modified purine; all pyrimidine of the sense strand comprises 2′-O-methyl modified pyrimidines; 1, 2, 3, 4, or 5 purines between positions 5 and 11 comprise a 2′flouro-modified purines, provided there are not three 2′ fluoro-modified purines in a row; the odd-numbered positions of the antisense strand comprise 2′-O-methyl modified nucleotides; and the even-numbered positions of the antisense strand comprise 2′flouro-modified nucleotides and unmodified deoxyribonucleotides. In some embodiments, there are not three 2′ fluoro-modified purines in a row. In some embodiments, there are not three 2′ fluoro-modified pyrimidines in a row.

[0087] In some embodiments, position nine of the sense strand comprises an unmodified deoxyribonucleotide. In some embodiments, positions 5, 7, and 8 of the sense strand comprise 2′fluoro-modifed nucleotides. In some embodiments, all pyrimidines in positions 10 to 21 of the sense strand comprise 2′-O-methyl modified pyrimidines and all purines in positions 10 to 21 of the comprise 2′-O-methyl modified purines or 2′fluoro-modified purines. In some embodiments, the odd-numbered positions of the antisense strand comprise 2′-O-methyl modified nucleotides. In some embodiments, the even-numbered positions of the antisense strand comprise 2′flouro-modified nucleotides and unmodified deoxyribonucleotides. In some embodiments, the even-numbered positions of the antisense strand comprise 2′flouro-modified nucleotides, 2′-O-methyl modified nucleotides and unmodified deoxyribonucleotides. In some embodiments, position nine of the sense strand comprises an unmodified deoxyribonucleotide; positions 5, 7, and 8 of the sense strand comprise 2′fluoro-modifed nucleotides; all pyrimidines in positions 10 to 21 of the sense strand comprise 2′-O-methyl modified pyrimidines and all purines in positions 10 to 21 of the comprise 2′-O-methyl modified purines or 2′fluoro-modified purines; the odd-numbered positions of the antisense strand comprise 2′-O-methyl modified nucleotides; and the even-numbered positions of the antisense strand comprise 2′flouro-modified nucleotides and unmodified deoxyribonucleotides.

[0088] In some embodiments, position nine of the sense strand comprises an unmodified deoxyribonucleotide. In some embodiments, positions 5, 7, and 8 of the sense strand comprise 2′fluoro-modified nucleotides. In some embodiments, all purines in positions 10 to 21 of the sense strand comprise 2′-O-methyl modified purines and all pyrimidines in positions 10 to 21 of the comprise 2′-O-methyl modified pyrimidines or 2′fluoro-modified pyrimidines. In some embodiments, the odd-numbered positions of the antisense strand comprise 2′-O-methyl modified nucleotides. In some embodiments, the even-numbered positions of the antisense strand comprise 2′flouro-modified nucleotides and unmodified deoxyribonucleotides. In some embodiments, the even-numbered positions of the antisense strand comprise 2′flouro-modified nucleotides, 2′-O-methyl modified nucleotides and unmodified deoxyribonucleotides. In some embodiments, position nine of the sense strand comprises an unmodified deoxyribonucleotide; positions 5, 7, and 8 of the sense strand comprise 2′fluoro-modified nucleotides; all purines in positions 10 to 21 of the sense strand comprise 2′-O-methyl modified purines and all pyrimidines in positions 10 to 21 of the comprise 2′-O-methyl modified pyrimidines or 2′fluoro-modified pyrimidines; the odd-numbered positions of the antisense strand comprise 2′-O-methyl modified nucleotides; and the even-numbered positions of the antisense strand comprise 2′flouro-modified nucleotides and unmodified deoxyribonucleotide.

[0089] In some embodiments, the moiety includes a negatively charged group attached at a 5′ end of the oligonucleotide. This may be referred to as a 5′-end group. In some embodiments, the negatively charged group is attached at a 5′ end of an antisense strand of an siRNA disclosed herein. The 5′-end group may be or include a 5′-end phosphorothioate, 5′-end phosphorodithioate, 5′-end vinylphosphonate (5′-VP), 5′-end methylphosphonate, 5′-end cyclopropyl phosphonate, or a 5′-deoxy-5′-C-malonyl. The 5′-end group may comprise 5′-VP. In some embodiments, the 5′-VP comprises a trans-vinylphosphate or cis-vinylphosphate. The 5′-end group may include an extra 5′ phosphate. A combination of 5′-end groups may be used.

[0090] In some embodiments, the oligonucleotide includes a negatively charged group. The negatively charged group may aid in cell or tissue penetration. The negatively charged group may be attached at a 5′ or 3′ end (e.g. a 5′ end) of the oligonucleotide. This may be referred to as an end group. The end group may be or include a phosphorothioate, phosphorodithioate, vinylphosphonate, methylphosphonate, cyclopropyl phosphonate, or a deoxy-C-malonyl. The end group may include an extra 5′ phosphate such as an extra 5′ phosphate. A combination of end groups may be used.

[0091] In some embodiments, the oligonucleotide includes a phosphate mimic. In some embodiments, the phosphate mimic comprises vinyl phosphonate. In some embodiments, the vinyl phosphonate comprises a trans-vinylphosphate. In some embodiments, the vinyl phosphonate comprises a cis-vinylphosphate. An example of a nucleotide that includes a vinyl phosphonate is shown below.

[chemical structure]

5′ vinylphosphonate 2′ O Methyl Uridine

[0092] In some embodiments, the vinyl phosphonate increases the stability of the oligonucleotide. In some embodiments, the vinyl phosphonate increases the accumulation of the oligonucleotide in tissues. In some embodiments, the vinyl phosphonate protects the oligonucleotide from an exonuclease or a phosphatase. In some embodiments, the vinyl phosphonate improves the binding affinity of the oligonucleotide with the siRNA processing machinery.

[0093] In some embodiments, the oligonucleotide includes 1 vinyl phosphonate. In some embodiments, the oligonucleotide includes 2 vinyl phosphonates. In some embodiments, the oligonucleotide includes 3 vinyl phosphonates. In some embodiments, the oligonucleotide includes 4 vinyl phosphonates. In some embodiments, the antisense strand of the oligonucleotide comprises a vinyl phosphonate at the 5′ end. In some embodiments, the antisense strand of the oligonucleotide comprises a vinyl phosphonate at the 3′ end. In some embodiments, the sense strand of the oligonucleotide comprises a vinyl phosphonate at the 5′ end. In some embodiments, the sense strand of the oligonucleotide comprises a vinyl phosphonate at the 3′ end.

### 1. Hydrophobic Moieties

[0094] In some embodiments, the composition comprises an oligonucleotide that inhibits the expression of FGG, wherein the oligonucleotide comprises a hydrophobic moiety. The hydrophobic moiety may be attached at a 3′ or 5′ terminus of the oligonucleotide. The hydrophobic moiety may include a lipid such as a fatty acid. The hydrophobic moiety may include a hydrocarbon. The hydrocarbon may be linear. The hydrocarbon may be non-linear. The hydrophobic moiety may include a lipid moiety or a cholesterol moiety, or a combination thereof.

[0095] In some embodiments, the composition comprises an oligonucleotide that inhibits the expression of FGG, wherein the oligonucleotide comprises a lipid attached at a 3′ or 5′ terminus of the oligonucleotide. In some embodiments, the lipid comprises cholesterol, myristoyl, palmitoyl, stearoyl, lithocholoyl, docosanoyl, docosahexaenoyl, myristyl, palmityl, stearyl, or α-tocopherol, or a combination thereof.

[0096] In some embodiments, the composition comprises an oligonucleotide that inhibits the expression of FGG, wherein the oligonucleotide comprises a hydrophobic ligand or moiety. In some embodiments, the hydrophobic ligand or moiety comprises cholesterol. In some embodiments, the hydrophobic ligand or moiety comprises a cholesterol derivative. In some embodiments, the hydrophobic ligand or moiety is attached at a 3′ terminus of the oligonucleotide. In some embodiments, the hydrophobic ligand or moiety s attached at a 5′ terminus of the oligonucleotide. In some embodiments, the composition comprises a sense strand, and the hydrophobic ligand or moiety is attached to the sense strand (e.g. attached to a 5′ end of the sense strand, or attached to a 3′ end of the sense strand). In some embodiments, the composition comprises an antisense strand, and the hydrophobic ligand or moiety is attached to the antisense strand (e.g. attached to a 5′ end of the antisense strand, or attached to a 3′ end of the antisense strand). In some embodiments, the composition comprises a hydrophobic ligand or moiety attached at a 3′ or 5′ terminus of the oligonucleotide.

[0097] In some embodiments, a hydrophobic moiety is attached to the oligonucleotide (e.g. a sense strand and/or an antisense strand of a siRNA). In some embodiments, a hydrophobic moiety is attached at a 3′ terminus of the oligonucleotide. In some embodiments, a hydrophobic moiety is attached at a 5′ terminus of the oligonucleotide. In some embodiments, the hydrophobic moiety comprises cholesterol. In some embodiments, the hydrophobic moiety includes a cyclohexanyl.

[0098] In some embodiments, the composition comprises an oligonucleotide that inhibits the expression of FGG, wherein the oligonucleotide comprises a lipid attached at a 3′ or 5′ terminus of the oligonucleotide. In some embodiments, a lipid is attached at a 3′ terminus of the oligonucleotide. In some embodiments, a lipid is attached at a 5′ terminus of the oligonucleotide. In some embodiments, the lipid comprises cholesterol, myristoyl, palmitoyl, stearoyl, lithocholoyl, docosanoyl, docosahexaenoyl, myristyl, palmityl, stearyl, or α-tocopherol, or a combination thereof. In some embodiments, the lipid comprises stearyl, lithocholyl, docosanyl, docosahexaenyl, or myristyl. In some embodiments, the lipid comprises cholesterol. In some embodiments, the lipid includes a sterol such as cholesterol. In some embodiments, the lipid comprises stearyl, t-butylphenol, n-butylphenol, octylphenol, dodecylphenol, phenyl n-dodecyl, octadecylbenzamide, hexadecylbenzamide, or octadecylcyclohexyl. In some embodiments, the lipid comprises phenyl para C12.

[0099] In some embodiments, the oligonucleotide comprises any aspect of the following structure:

[chemical structure]

In some embodiments, the oligonucleotide comprises any aspect of the following structure:

[chemical structure]

In some embodiments, the oligonucleotide comprises any aspect of the following structure:

[chemical structure]

In some embodiments, the oligonucleotide comprises any aspect of the following structure: The aspect included in the oligonucleotide may include the entire structure, or may include the lipid moiety, of any of the structures shown. In some embodiments, n is 1-3. In some embodiments, n is 1. In some embodiments, n is 2. In some embodiments, n is 3. In some embodiments, R is an alkyl group. In some embodiments, the alkyl group contains 1, 2, 3, 4, 5, 6, 7, 8, 9, 10, 11, 12, 13, 14, 15, 16, 17, 18, 19, or 20 carbons. In some embodiments, the alkyl group contains 4, 5, 6, 7, 8, 9, 10, 11, 12, 13, 14, 15, 16, 17, or 18 carbons, or a range defined by any two of the aforementioned numbers of carbons. In some embodiments, the alkyl group contains 4-18 carbons. In some embodiments, the lipid moiety comprises an alcohol or ether.

[0100] In some embodiments, the lipid includes a fatty acid. In some embodiments, the lipid comprises a lipid depicted in Table 1. The example lipid moieties in Table 1 are shown attached at a 5′ end of an oligonucleotide, in which the 5′ terminal phosphate of the oligonucleotide is shown with the lipid moiety. In some embodiments, a lipid moiety in Table 1 may be attached at a different point of attachment than shown. For example, the point of attachment of any of the lipid moieties in the table may be at a 3′ oligonucleotide end. In some embodiments, the lipid is used for targeting the oligonucleotide to a non-hepatic cell or tissue.

TABLE 1
Hydrophobic moiety examples

| Hydrophobic | | |
|---|---|---|
| Moiety | Hydrophobic | |
| Description | Moiety Name | Example Conjugation |
| stearyl | ETL3 | [chemical structure] |
| t-butylphenyl | ETL7 | [chemical structure] |
| n-butylphenyl | ETL8 | [chemical structure] |
| octylphenyl | ETL9 | [chemical structure] |
| dodecylphenyl | ETL10 | [chemical structure] |
| phenyl n- dodecyl | ETL12 | [chemical structure] |
| octadecyl- benzamide | ETL13 | [chemical structure] |
| hexadecyl- benzamide | ETL15 | [chemical structure] |
| octadecyl- cyclohexyl | ETL16 | [chemical structure] |
| myristamido methylphenyl | ETL18 | [chemical structure] |
| lauramido methylphenyl | ETL 19 | [chemical structure] |
| phenethyl- palmityl | ETL20 | [chemical structure] |

[0101] In some embodiments, the lipid or lipid moiety includes 16 to 18 carbons. In some embodiments, the lipid includes 16 carbons. In some embodiments, the lipid includes 17 carbons. In some embodiments, the lipid includes 18 carbons. In some embodiments, the lipid moiety includes 16 carbons. In some embodiments, the lipid moiety includes 17 carbons. In some embodiments, the lipid moiety includes 18 carbons.

[0102] The hydrophobic moiety may include a linker that comprises a carbocycle. The carbocycle may be six-membered. Some examples of a carbocycle include phenyl or cyclohexyl. The linker may include a phenyl. The linker may include a cyclohexyl. The lipid may be attached to the carbocycle, which may in turn be attached at a phosphate (e.g. 5′ or 3′ phosphate) of the oligonucleotide. In some embodiments, the lipid or hydrocarbon, and the end of the sense are connected to the phenyl or cyclohexyl linker in the 1,4; 1,3; or 1,2 substitution pattern (e.g. the para, meta, or ortho phenyl configuration). In some embodiments, the lipid or hydrocarbon, and the end of the sense are connected to the phenyl or cyclohexyl linker in the 1,4 substitution pattern (e.g. the para phenyl configuration). The lipid may be attached to the carbocycle in the 1,4 substitution pattern relative to the oligonucleotide. The lipid may be attached to the carbocycle in the 1,3 substitution pattern relative to the oligonucleotide. The lipid may be attached to the carbocycle in the 1,2 substitution pattern relative to the oligonucleotide. The lipid may be attached to the carbocycle in the ortho orientation relative to the oligonucleotide. The lipid may be attached to the carbocycle in the para orientation relative to the oligonucleotide. The lipid may be attached to the carbocycle in the meta orientation relative to the oligonucleotide.

[0103] The lipid moiety may comprise or consist of the following structure

[chemical structure]

In some embodiments, the lipid moiety comprises or consists of the following structure:

[chemical structure]

In some embodiments, the lipid moiety comprises the following structure:

[chemical structure]

In some embodiments, the lipid moiety comprises or consist of the following structure:

[chemical structure]

In some embodiments, the dotted line indicates a covalent connection. The covalent connection may between an end of the sense or antisense strand. For example, the connection may be to the 5′ end of the sense strand. In some embodiments, n is 0-3. In some embodiments, n is 1-3. In some embodiments, n is 0. In some embodiments, n is 1. In some embodiments, n is 2. In some embodiments, n is 3. In some embodiments, n is 4. In some embodiments, n is 5. In some embodiments, n is 1, 2, 3, 4, 5, 6, 7, 8, 9, or 10. In some embodiments, R is an alkyl group. In some embodiments, the alkyl group contains 1, 2, 3, 4, 5, 6, 7, 8, 9, 10, 11, 12, 13, 14, 15, 16, 17, 18, 19, or 20 carbons. In some embodiments, the alkyl group contains 4, 5, 6, 7, 8, 9, 10, 11, 12, 13, 14, 15, 16, 17, or 18 carbons, or a range defined by any two of the aforementioned numbers of carbons. In some embodiments, R comprises or consists of an alkyl group containing 4-18 carbons.

[0104] The lipid moiety may be attached at a 5′ end of the oligonucleotide. The 5′ end may have one phosphate linking the lipid moiety to a 5′ carbon of a sugar of the oligonucleotide. The 5′ end may have two phosphates linking the lipid moiety to a 5′ carbon of a sugar of the oligonucleotide. The 5′ end may have three phosphates linking the lipid moiety to a 5′ carbon of a sugar of the oligonucleotide. The 5′ end may have one phosphate connected to the 5′ carbon of a sugar of the oligonucleotide, where the one phosphate is connected to the lipid moiety. The 5′ end may have two phosphates connected to the 5′ carbon of a sugar of the oligonucleotide, where the one of the two phosphates is connected to the lipid moiety. The 5′ end may have three phosphates connected to the 5′ carbon of a sugar of the oligonucleotide, where the one of the three phosphates is connected to the lipid moiety. The sugar may include a ribose. The sugar may include a deoxyribose. The sugar may be modified a such as a 2′ modified sugar (e.g. a 2′ O-methyl or 2′ fluoro ribose). A phosphate of the 5′ end may include a modification such as a sulfur in place of an oxygen. Two phosphates of the 5′ end may include a modification such as a sulfur in place of an oxygen. Three phosphates of the 5′ end may include a modification such as a sulfur in place of an oxygen.

[0105] In some embodiments, the oligonucleotide includes 1 lipid moiety. In some embodiments, the oligonucleotide includes 2 lipid moieties. In some embodiments, the oligonucleotide includes 3 lipid moieties. In some embodiments, the oligonucleotide includes 4 lipid moieties.

[0106] Some embodiments relate to a method of making an oligonucleotide comprising a hydrophobic conjugate. A strategy for making hydrophobic conjugates may include use of a phosphoramidite reagent based upon a 6-membered ring alcohol such as a phenol or cyclohexanol. The phosphoramidite may be reacted to a nucleotide to connect the nucleotide to the hydrophobic moiety, and thereby produce the hydrophobic conjugate. Some examples of phosphoramidite reagents that may be used to produce a hydrophobic conjugate are provided as follows:

[chemical structure]

In some embodiments, n is 1-3. In some embodiments, n is 1. In some embodiments, n is 2. In some embodiments, n is 3. In some embodiments, R is an alkyl group. In some embodiments, the alkyl group contains 1, 2, 3, 4, 5, 6, 7, 8, 9, 10, 11, 12, 13, 14, 15, 16, 17, 18, 19, or 20 carbons. In some embodiments, the alkyl group contains 4, 5, 6, 7, 8, 9, 10, 11, 12, 13, 14, 15, 16, 17, or 18 carbons, or a range defined by any two of the aforementioned numbers of carbons. In some embodiments, R comprises or consists of an alkyl group containing 4-18 carbons. Any one of the phosphoramidite reagents may be reacted to a 5′ end of an oligonucleotide to produce an oligonucleotide comprising a hydrophobic moiety. In some embodiments, the phosphoramidite reagents is reacted to a 5′ end of a sense strand of an siRNA. The sense strand may then be hybridized to an antisense strand to form a duplex. The hybridization may be performed by incubating the sense and antisense strands in solution at a given temperature. The temperature may be gradually reduced. The temperature may comprise or include a temperature comprising an annealing temperature for the sense and antisense strands. The temperature may be below or include a temperature below the annealing temperature for the sense and antisense strands. The temperature may be below a melting temperature of the sense and antisense strands.

[0107] The lipid may be attached to the oligonucleotide by a linker. The linker may include a polyethyleneglycol (e.g. tetraethyleneglycol).

[0108] The modifications described herein may be useful for delivery to a cell or tissue, for example, extrahepatic delivery or targeting of an oligonucleotide composition. The modifications described herein may be useful for targeting an oligonucleotide composition to a cell or tissue.

### 2. Sugar Moieties

[0109] In some embodiments, the composition comprises an oligonucleotide that inhibits the expression of FGG, wherein the oligonucleotide comprises a sugar moiety. The sugar moiety may include an N-acetyl galactose moiety (e.g. an N-acetylgalactosamine (GalNAc) moiety), an N-acetyl glucose moiety (e.g. an N-acetylglucosaminc (GlcNAc) moiety), a fucose moiety, or a mannose moiety. The sugar moiety may include 1, 2, 3, or more sugar molecules. The sugar moiety may be attached at a 3′ or 5′ terminus of the oligonucleotide. The sugar moiety may include an N-acetyl galactose moiety. The sugar moiety may include an N-acetylgalactosamine (GalNAc) moiety. The sugar moiety may include an N-acetyl glucose moiety. The sugar moiety may include N-acetylglucosamine (GlcNAc) moiety. The sugar moiety may include a fucose moiety. The sugar moiety may include a mannose moiety. N-acetyl glucose, GlcNAc, fucose, or mannose may be useful for targeting macrophages when they target or bind a mannose receptor such as CD206. The sugar moiety may be useful for binding or targeting an asialoglycoprotein receptor such as an asialoglycoprotein receptor of a hepatocyte. The GalNAc moiety may bind to an asialoglycoprotein receptor. The GalNAc moiety may target a hepatocyte.

[0110] In some embodiments, the composition comprises an oligonucleotide that inhibits the expression of FGG, wherein the oligonucleotide comprises an N-acetylgalactosamine (GalNAc) moiety. GalNAc may be useful for hepatocyte targeting. The GalNAc moiety may include a bivalent or trivalent branched linker. The oligo may be attached to 1, 2 or 3 GalNAcs through a bivalent or trivalent branched linker. The GalNAc moiety may include 1, 2, 3, or more GalNAc molecules. The GalNAc moiety may be attached at a 3′ or 5′ terminus of the oligonucleotide.

[0111] In some embodiments, the composition comprises an oligonucleotide that inhibits the expression of FGG, wherein the oligonucleotide comprises an N-acetylgalactosamine (GalNAc) ligand for hepatocyte targeting. In some embodiments, the composition comprises GalNAc. In some embodiments, the composition comprises a GalNAc derivative. In some embodiments, the GalNAc ligand is attached at a 3′ terminus of the oligonucleotide. In some embodiments, the GalNAc ligand is attached at a 5′ terminus of the oligonucleotide. In some embodiments, the composition comprises a sense strand, and the GalNAc ligand is attached to the sense strand (e.g. attached to a 5′ end of the sense strand, or attached to a 3′ end of the sense strand). In some embodiments, the composition comprises an antisense strand, and the GalNAc ligand is attached to the antisense strand (e.g. attached to a 5′ end of the antisense strand, or attached to a 3′ end of the antisense strand). In some embodiments, the composition comprises a GalNAc ligand attached at a 3′ or 5′ terminus of the oligonucleotide.

[0112] Disclosed herein, in some embodiments, are compositions comprising an oligonucleotide that inhibits the expression of FGG, wherein the oligonucleotide comprises a GalNAc moiety. The GalNAc moiety may be included in any formula, structure, or GalNAc moiety shown below. In some embodiments, described herein is a compound (e.g. oligonucleotide) represented by Formula (I) or (II):

[chemical structure]

or a salt thereof, wherein
[0113] J is an oligonucleotide;
[0114] each w is independently selected from any value from 1 to 20;
[0115] each v is independently selected from any value from 1 to 20;
[0116] n is selected from any value from 1 to 20;
[0117] m is selected from any value from 1 to 20;
[0118] z is selected from any value from 1 to 3, wherein
   [0119] if z is 3, Y is C
   [0120] if z is 2, Y is CR⁶, or
   [0121] if z is 1, Y is C(R⁶)₂;
[0122] Q is selected from:
   [0123] C₃₋₁₀ carbocycle optionally substituted with one or more substituents independently selected from halogen, —CN, —NO₂, —OR⁷, —SR⁷, —N(R⁷)₂, —C(O)R⁷, —C(O)N(R⁷)₂, —N(R⁷)C(O)R⁷, —N(R⁷)C(O)N(R⁷)₂, —OC(O)N(R⁷)₂, —N(R⁷)C(O)OR⁷, —C(O)OR⁷, —OC(O)R⁷, —S(O)R⁷, and C₁₋₆ alkyl, wherein the C₁₋₆ alkyl, is optionally substituted with one or more substituents independently selected from halogen, —CN, —OH, —SH, —NO₂, and —NH₂;
[0124] R¹ is a linker selected from:
   [0125] —O—, —S—, —N(R⁷)—, —C(O)—, —C(O)N(R⁷)—, —N(R⁷)C(O)—, —N(R⁷)C(O)N(R⁷)—, —OC(O)N(R⁷)—, —N(R⁷)C(O)O—, —C(O)O—, —OC(O)—, —S(O)—, —S(O)₂—, —OS(O)₂—, —OP(O)(OR⁷)O—, —SP(O)(OR⁷)O—, —OP(S)(OR⁷)O—, —OP(O)(SR⁷)O—, —OP(O)(OR⁷)S—, —OP(O)(O⁻)O—, —SP(O)(O⁻)O—, —OP(S)(O⁻)O—, —OP(O)(S⁻)O—, —OP(O)(O⁻)S—, —OP(O)(OR⁷)NR⁷—, —OP(O)(N(R⁷)₂)NR⁷—, —OP(OR⁷)O—, —OP(N(R⁷)₂)O—, —OP(OR⁷)N(R⁷)—, and —OPN(R⁷)₂NR⁷—;
[0126] each R² is independently selected from:
   [0127] C₁₋₆ alkyl optionally substituted with one or more substituents independently selected from halogen, —OR⁷, —SR⁷, —N(R⁷)₂, —C(O)R⁷, —C(O)N(R⁷)₂, —N(R⁷)C(O)R⁷, —N(R⁷)C(O)N(R⁷)₂, —OC(O)N(R⁷)₂, —N(R⁷)C(O)OR⁷, —C(O)OR⁷, —OC(O)R⁷, and —S(O)R⁷;
[0128] R³ and R⁴ are each independently selected from:
   [0129] —OR⁷, —SR⁷, —N(R⁷)₂, —C(O)R⁷, —C(O)N(R⁷)₂, —N(R⁷)C(O)R⁷, —N(R⁷)C(O)N(R⁷)₂, —OC(O)N(R⁷)₂, —N(R⁷)C(O)OR⁷, —C(O)OR⁷, —OC(O)R⁷, and —S(O)R⁷;
[0130] each R⁵ is independently selected from:
   [0131] —OC(O)R⁷, —OC(O)N(R⁷)₂, —N(R⁷)C(O)R⁷, —N(R⁷)C(O)N(R⁷)₂, —N(R⁷)C(O)OR⁷, —C(O)R⁷, —C(O)OR⁷, and —C(O)N(R⁷)₂;
[0132] each R⁶ is independently selected from:
   [0133] hydrogen;
   [0134] halogen, —CN, —NO₂, —OR⁷, —SR⁷, —N(R⁷)₂, —C(O)R⁷, —C(O)N(R⁷)₂, —N(R⁷)C(O)R⁷, —N(R⁷)C(O)N(R⁷)₂, —OC(O)N(R⁷)₂, —N(R⁷)C(O)OR⁷, —C(O)OR⁷, —OC(O)R⁷, and —S(O)R⁷; and
   [0135] C₁₋₆ alkyl optionally substituted with one or more substituents independently selected from halogen, —CN, —NO₂, —OR⁷, —SR⁷, —N(R⁷)₂, —C(O)R⁷, —C(O)N(R⁷)₂, —N(R⁷)C(O)R⁷, —N(R⁷)C(O)N(R⁷)₂, —OC(O)N(R⁷)₂, —N(R⁷)C(O)OR⁷, —C(O)OR⁷, —OC(O)R⁷, and —S(O)R⁷;
[0136] each R⁷ is independently selected from:
   [0137] hydrogen;
   [0138] C₁₋₆ alkyl, C₂₋₆ alkenyl, and C₂₋₆ alkynyl, each of which is optionally substituted with one or more substituents independently selected from halogen, —CN, —OH, —SH, —NO₂, —NH₂, ═O, ═S, —O—C₁₋₆ alkyl, —S—C₁₋₆ alkyl, —N(C₁₋₆ alkyl)₂, —NH(C₁₋₆ alkyl), C₃₋₁₀ carbocycle, and 3- to 10-membered heterocycle; and
   [0139] C₃₋₁₀ carbocycle, and 3- to 10-membered heterocycle, each of which is optionally substituted with one or more substituents independently selected from halogen, —CN, —OH, —SH, —NO₂, —NH₂, ═O, ═S, —O—C₁₋₆ alkyl, —S—C₁₋₆ alkyl, —N(C₁₋₆ alkyl)₂, —NH(C₁₋₆ alkyl), C₁₋₆ alkyl, C₂₋₆ alkenyl, C₂₋₆ alkynyl, C₃₋₁₀ carbocycle, 3- to 10-membered heterocycle, and C₁₋₆haloalkyl.

[0140] In some embodiments, each w is independently selected from any value from 1 to 10. In some embodiments, each w is independently selected from any value from 1 to 5. In some embodiments, each w is 1. In some embodiments, each v is independently selected from any value from 1 to 10. In some embodiments, each v is independently selected from any value from 1 to 5. In some embodiments, each v is 1. In some embodiments, n is selected from any value from 1 to 10. In some embodiments, n is selected from any value from 1 to 5. In some embodiments, n is 2. In some embodiments, m is selected from any value from 1 to 10. In some embodiments, m is selected from any value from 1 to 5. In some embodiments, m is selected from 1 and 2. In some embodiments, z is 3 and Y is C. In some embodiments, Q is selected from C₅₋₆ carbocycle optionally substituted with one or more substituents independently selected from halogen, —CN, —NO₂, —OR⁷, —SR⁷, —N(R⁷)₂, —C(O)R⁷, —C(O)N(R⁷)₂, —N(R⁷)C(O)R⁷, —N(R⁷)C(O)N(R⁷)₂, —OC(O)N(R⁷)₂, —N(R⁷)C(O)OR⁷, —C(O)OR⁷, —OC(O)R⁷, and —S(O)R⁷. In some embodiments, Q is selected from C₅₋₆ carbocycle optionally substituted with one or more substituents independently selected from halogen, —CN, —OH, —SH, —NO₂, and —NH₂. In some embodiments, Q is selected from phenyl and cyclohexyl, each of which is optionally substituted with one or more substituents independently selected from halogen, —CN, —OH, —SH, —NO₂, and —NH₂. In some embodiments, Q is selected from phenyl. In some embodiments, Q is selected from cyclohexyl. In some embodiments, R¹ is selected from —OP(O)(OR⁷)O—, —SP(O)(OR⁷)O—, —OP(S)(OR⁷)O—, —OP(O)(SR⁷)O—, —OP(O)(OR⁷)S—, —OP(O)(O⁻)O—, —SP(O)(O⁻)O—, —OP(S)(O⁻)O—, —OP(O)(S⁻)O—, —OP(O)(O⁻)S—, —OP(O)(OR⁷)NR⁷—, —OP(O)(N(R⁷)₂)NR⁷—, —OP(OR⁷)O—, —OP(N(R⁷)₂)O—, —OP(OR⁷)N(R⁷)—, and —OPN(R⁷)₂, NR⁷. In some embodiments, R¹ is selected from —OP(O)(OR⁷)O—, —SP(O)(OR⁷)O—, —OP(S)(OR⁷)O—, —OP(O)(SR⁷)O—, —OP(O)(OR⁷)S—, —OP(O)(O⁻)O—, —SP(O)(O⁻)O—, —OP(S)(O⁻)O—, —OP(O)(S⁻)O—, —OP(O)(O⁻)S—, and —OP(OR⁷)O—. In some embodiments, R¹ is selected from —OP(O)(OR⁷)O—, —OP(S)(OR⁷)O—, —OP(O)(O⁻)O—, —OP(S)(O⁻)O—, —OP(O)(S⁻)O—, and —OP(OR⁷)O—. In some embodiments, R¹ is selected from —OP(O)(OR⁷)O— and —OP(OR⁷)O—. In some embodiments, R² is selected from C₁₋₃ alkyl substituted with one or more substituents independently selected from halogen, —OR⁷, —OC(O)R⁷, —SR⁷, —N(R⁷)₂, —C(O)R⁷, and —S(O)R⁷. In some embodiments, R² is selected from C₁₋₃ alkyl substituted with one or more substituents independently selected from —OR⁷, —OC(O)R⁷, —SR⁷, and —N(R⁷)₂. In some embodiments, R² is selected from C₁₋₃ alkyl substituted with one or more substituents independently selected from —OR⁷ and —OC(O)R⁷. In some embodiments, R³ is selected from halogen, —OR⁷, —SR⁷, —N(R⁷)₂, —C(O)R⁷, —OC(O)R⁷, and —S(O)R⁷. In some embodiments, R³ is selected from —OR⁷, —SR⁷, —OC(O)R⁷, and —N(R⁷)₂. In some embodiments, R³ is selected from —OR⁷— and —OC(O)R⁷. In some embodiments, R⁴ is selected from halogen, —OR⁷, —SR⁷, —N(R⁷)₂, —C(O)R⁷, —OC(O)R⁷, and —S(O)R⁷. In some embodiments, R⁴ is selected from —OR⁷, —SR⁷, —OC(O)R⁷, and —N(R⁷)₂. In some embodiments, R⁴ is selected from —OR⁷— and —OC(O)R⁷. In some embodiments, R⁵ is selected from —OC(O)R⁷, —OC(O)N(R⁷)₂, —N(R⁷)C(O)R⁷, —N(R⁷)C(O)N(R⁷)₂, and —N(R⁷)C(O)OR⁷. In some embodiments, R⁵ is selected from —OC(O)R⁷ and —N(R⁷)C(O)R⁷. In some embodiments, each R⁷ is independently selected from: hydrogen; and C₁₋₆ alkyl optionally substituted with one or more substituents independently selected from halogen, —CN, —OH, —SH, —NO₂, —NH₂, ═O, ═S, —O—C₁₋₆ alkyl, —S—C₁₋₆ alkyl, —N(C₁₋₆ alkyl)₂, —NH(C₁₋₆ alkyl), C₃₋₁₀ carbocycle, or 3- to 10-membered heterocycle. In some embodiments, each R⁷ is independently selected from C₁₋₆ alkyl optionally substituted with one or more substituents independently selected from halogen, —CN, —OH, —SH, —NO₂, —NH₂, ═O, ═S, —O—C₁₋₆ alkyl, —S—C₁₋₆ alkyl, —N(C₁₋₆ alkyl)₂, and —NH(C₁₋₆ alkyl). In some embodiments, each R⁷ is independently selected from C₁₋₆ alkyl optionally substituted with one or more substituents independently selected from halogen, —CN, —OH, and —SH. In some embodiments, w is 1; v is 1; n is 2; m is 1 or 2; z is 3 and Y is C; Q is phenyl or cyclohexyl, each of which is optionally substituted with one or more substituents independently selected from halogen, —CN, —OH, —SH, —NO₂, —NH₂, and C₁₋₃ alkyl; R¹ is selected from —OP(O)(OR⁷)O—, —OP(S)(OR⁷)O—, —OP(O)(O⁻)O—, —OP(S)(O⁻)O—, —OP(O)(S⁻)O—, and —OP(OR⁷)O—; R² is C₁ alkyl substituted with —OH or —OC(O)CH₃;
[0141] R³ is —OH or —OC(O)CH₃; R⁴ is —OH or —OC(O)CH₃; and R⁵ is —NH(O)CH₃. In some embodiments, the compound comprises:

[chemical structure]

[chemical structure]

[chemical structure]

[chemical structure]

[chemical structure]

[chemical structure]

[chemical structure]

[chemical structure]

[chemical structure]

[chemical structure]

[chemical structure]

[chemical structure]

[chemical structure]

[chemical structure]

[chemical structure]

[chemical structure]

[chemical structure]

[0142] In some embodiments, the oligonucleotide (J) is attached at a 5′ end or a 3′ end of the oligonucleotide. In some embodiments, the oligonucleotide comprises DNA. In some embodiments, the oligonucleotide comprises RNA. In some embodiments, the oligonucleotide comprises one or more modified internucleoside linkages. In some embodiments, the one or more modified internucleoside linkages comprise alkylphosphonate, phosphorothioate, methylphosphonate, phosphorodithioate, alkylphosphonothioate, phosphoramidate, carbamate, carbonate, phosphate triester, acetamidate, or carboxymethyl ester, or a combination thereof. In some embodiments, the oligonucleotide comprises 1, 2, 3, 4, 5, 6, 7, 8, 9, 10, 11, 12, 13, 14, 15, 16, 17, 18, 19, or 20 modified internucleoside linkages. In some embodiments, the compound binds to an asialoglycoprotein receptor. In some embodiments, the compound targets a hepatocyte.

[0143] Some embodiments include the following, where J is the oligonucleotide:

[chemical structure]

J may include one or more additional phosphates, or one or more phosphorothioates linking to the oligonucleotide. J may include one or more additional phosphates linking to the oligonucleotide. J may include one or more phosphorothioates linking to the oligonucleotide.

[0144] Some embodiments include the following, where J is the oligonucleotide:

[chemical structure]

J may include one or more additional phosphates, or one or more phosphorothioates linking to the oligonucleotide. J may include one or more additional phosphates linking to the oligonucleotide. J may include one or more phosphorothioates linking to the oligonucleotide.

[0145] Some embodiments include the following, where J is the oligonucleotide:

[chemical structure]

J may include one or more phosphates or phosphorothioates linking to the oligonucleotide. J may include one or more phosphates linking to the oligonucleotide. J may include a phosphate linking to the oligonucleotide. J may include one or more phosphorothioates linking to the oligonucleotide. J may include a phosphorothioate linking to the oligonucleotide.

[0146] Some embodiments include the following, where J is the oligonucleotide:

[chemical structure]

The structure in this compound attached to the oligonucleotide (J) may be referred to as “ETL17,” and is an example of a GalNAc moiety. J may include one or more phosphates or phosphorothioates linking to the oligonucleotide. J may include one or more phosphates linking to the oligonucleotide. J may include a phosphate linking to the oligonucleotide. J may include one or more phosphorothioates linking to the oligonucleotide. J may include a phosphorothioate linking to the oligonucleotide.

[0147] Some embodiments include the following, where the phosphate or “5′” indicates a connection to the oligonucleotide:

[chemical structure]

[0148] Some embodiments include the following, where the phosphate or “5′” indicates a connection to the oligonucleotide:

[chemical structure]

[0149] Some embodiments include the following, where J is the oligonucleotide:

[chemical structure]

include one or more phosphates or phosphorothioates linking to the oligonucleotide. J may include one or more phosphates linking to the oligonucleotide. J may include a phosphate linking to the oligonucleotide. J may include one or more phosphorothioates linking to the oligonucleotide. J may include a phosphorothioate linking to the oligonucleotide.

[0150] Some embodiments include the following, where J is the oligonucleotide:

[chemical structure]

The structure in this compound attached to the oligonucleotide (J) may be referred to as “ETL1,” and is an example of a GalNAc moiety. J may include one or more phosphates or phosphorothioates linking to the oligonucleotide. J may include one or more phosphates linking to the oligonucleotide. J may include a phosphate linking to the oligonucleotide. J may include one or more phosphorothioates linking to the oligonucleotide. J may include a phosphorothioate linking to the oligonucleotide.
3. siRNA Modification Patterns

[0151] In some embodiments, the composition comprises an oligonucleotide that inhibits the expression of FGG, wherein the oligonucleotide comprises an siRNA comprising a sense strand and an antisense strand, wherein the sense strand comprises modification pattern 1S: 5′-NfsnsNfnNfnNfNfNfnNfnNfnNfnNfnNfsnsn-3′ (SEQ ID NO: 3622), wherein “Nf” is a 2′ fluoro-modified nucleoside, “n” is a 2′ O-methyl modified nucleoside, and “s” is a phosphorothioate linkage. In some embodiments, the sense strand comprises modification pattern 2S: 5′-nsnsnnNfnNfNfNfnnnnnnnnnnsnsn-3′ (SEQ ID NO: 3623), wherein “Nf” is a 2′ fluoro-modified nucleoside, “n” is a 2′ O-methyl modified nucleoside, and “s” is a phosphorothioate linkage. In some embodiments, the sense strand comprises modification pattern 3S: 5′-nsnsnnNfnNfnNfnnnnnnnnnnsnsn-3′ (SEQ ID NO: 3624), wherein “Nf” is a 2′ fluoro-modified nucleoside, “n” is a 2′ O-methyl modified nucleoside, and “s” is a phosphorothioate linkage. In some embodiments, the sense strand comprises modification pattern 4S: 5′-NfsnsNfnNfnNfNfNfnNfnNfnNfnNfnNfsnsnN-moiety-3′ (SEQ ID NO: 3625), wherein “Nf” is a 2′ fluoro-modified nucleoside, “n” is a 2′ O-methyl modified nucleoside, “s” is a phosphorothioate linkage, and N comprises one or more nucleosides. In some embodiments, the sense strand comprises modification pattern 5S: 5′-nsnsnnNfnNfNfNfnnnnnnnnnnsnsnN-moiety-3′ (SEQ ID NO: 3626), wherein “Nf” is a 2′ fluoro-modified nucleoside, “n” is a 2′ O-methyl modified nucleoside, “s” is a phosphorothioate linkage, and N comprises one or more nucleosides. In some embodiments, the moiety in modification pattern 4S or 5S is a lipid moiety. In some embodiments, the moiety in modification pattern 4S or 5S is a sugar moiety. In some embodiments, the sense strand comprises modification pattern 6S: 5′-NfsnsNfnNfnNfnNfnNfnNfnNfnNfnNfsnsn-3′ (SEQ ID NO: 3627), wherein “Nf” is a 2′ fluoro-modified nucleoside, “n” is a 2′ O-methyl modified nucleoside, and “s” is a phosphorothioate linkage. In some embodiments, the sense strand comprises modification pattern 7S: 5′-nsnsnnNfNfNfNfNfnnnnnnnnnnsnsn-3′ (SEQ ID NO: 3628), wherein “Nf” is a 2′ fluoro-modified nucleoside, “n” is a 2′ O-methyl modified nucleoside, and “s” is a phosphorothioate linkage. In some embodiments, the sense strand comprises modification pattern 8S: 5′-nsnsnnnNfNfNfNfnnnnnnnnnnsnsn-3′ (SEQ ID NO: 3629), wherein “Nf” is a 2′ fluoro-modified nucleoside, “n” is a 2′ O-methyl modified nucleoside, and “s” is a phosphorothioate linkage. In some embodiments, the sense strand comprises modification pattern 9S: 5′-nsnsnnnnNfNfNfNfnnnnnnnnnsnsn-3′ (SEQ ID NO: 3630), wherein “Nf” is a 2′ fluoro-modified nucleoside, “n” is a 2′ O-methyl modified nucleoside, and “s” is a phosphorothioate linkage. In some embodiments, the sense strand comprises modification pattern 10S: 5′-nsnsnnNfNfnNfNfnnnnnnnnnnsnsn-3′ (SEQ ID NO: 3785), wherein “Nf” is a 2′ fluoro-modified nucleoside, “n” is a 2′ O-methyl modified nucleoside, and “s” is a phosphorothioate linkage.

[0152] In some embodiments, the sense strand comprises modification pattern 11S: 5′-nsnsnnNfnnnNfnnnnnnnnnnsnsn-3′ (SEQ ID NO: 3786), wherein “Nf” is a 2′ fluoro-modified nucleoside, “n” is a 2′ O-methyl modified nucleoside, and “s” is a phosphorothioate linkage.

[0153] In some embodiments, the sense strand comprises modification pattern 12S: 5′-snnnnNfNfnNfNfnnnnNfnnNfnnsnsn-3′ (SEQ ID NO: 3787), wherein “Nf” is a 2′ fluoro-modified nucleoside, “n” is a 2′ O-methyl modified nucleoside, and “s” is a phosphorothioate linkage.

[0154] In some embodiments, the sense strand comprises modification pattern 13S: 5′-snnnnNfNfnNfdNnNfNfnnNfnnnnsnsn-3′ (SEQ ID NO: 3788), wherein “Nf” is a 2′ fluoro-modified nucleoside, “n” is a 2′ O-methyl modified nucleoside, and “s” is a phosphorothioate linkage.

[0155] In some embodiments, the sense strand comprises modification pattern 14S: 5′-snnNfNfnnnnNfnnnnNfnNfNfnnsnsn-3′ (SEQ ID NO: 3789), wherein “Nf” is a 2′ fluoro-modified nucleoside, “n” is a 2′ O-methyl modified nucleoside, and “s” is a phosphorothioate linkage.

[0156] In some embodiments, the sense strand comprises modification pattern 15S: 5′-snnNfnNfnNfNfdNnNfNfnnNfnnnnsnsn-3′ (SEQ ID NO: 3790), wherein “Nf” is a 2′ fluoro-modified nucleoside, “n” is a 2′ O-methyl modified nucleoside, and “s” is a phosphorothioate linkage. In some embodiments, the sense strand comprises modification pattern 16S: 5′-snnnnNfnNfNfNfNfnnnnnnnnnsnsn-3′ (SEQ ID NO: 3791), wherein “Nf” is a 2′ fluoro-modified nucleoside, “n” is a 2′ O-methyl modified nucleoside, and “s” is a phosphorothioate linkage. In some embodiments, the sense strand comprises modification pattern 17S: 5′-snnnnnNfNfNfNfnnnnnnnnnnsnsn-3′ (SEQ ID NO: 3792), wherein “Nf” is a 2′ fluoro-modified nucleoside, “n” is a 2′ O-methyl modified nucleoside, and “s” is a phosphorothioate linkage. In some embodiments, the sense strand comprises modification pattern 18S: 5′-snnnnNfNfnNfNfnnnnnnnnnnsnsn-3′ (SEQ ID NO: 3793), wherein “Nf” is a 2′ fluoro-modified nucleoside, “n” is a 2′ O-methyl modified nucleoside, and “s” is a phosphorothioate linkage. In some embodiments, the sense strand comprises modification pattern 19S: 5′-snnnnNfnnnNfnnnnnnnnnnsnsn-3′ (SEQ ID NO: 3794), wherein “Nf” is a 2′ fluoro-modified nucleoside, “n” is a 2′ O-methyl modified nucleoside, and “s” is a phosphorothioate linkage. In some embodiments, the sense strand comprises modification pattern 20S: 5′-snnnnnNfNfNfNfnNfnnnnnnnnsnsn-3′ (SEQ ID NO: 3795), wherein “Nf” is a 2′ fluoro-modified nucleoside, “n” is a 2′ O-methyl modified nucleoside, and “s” is a phosphorothioate linkage. In some embodiments, the sense strand comprises modification pattern 21S: 5′-snnnnnnNfNfNfNfNfnnnnnnnnsnsn-3′ (SEQ ID NO: 3796), wherein “Nf” is a 2′ fluoro-modified nucleoside, “n” is a 2′ O-methyl modified nucleoside, and “s” is a phosphorothioate linkage. In some embodiments, the sense strand comprises modification pattern 22S: 5′-snnnnNfNfnNfNfnNfnnnnnnnnsnsn-3′ (SEQ ID NO: 3797), wherein “Nf” is a 2′ fluoro-modified nucleoside, “n” is a 2′ O-methyl modified nucleoside, and “s” is a phosphorothioate linkage. In some embodiments, the sense strand comprises modification pattern 23S: 5′-snnnnNfnNfNfdTnnnnnnnnnnsnsn-3′ (SEQ ID NO: 3798), wherein “dT” is deoxythymidine, “Nf” is a 2′ fluoro-modified nucleoside, “n” is a 2′ O-methyl modified nucleoside, and “s” is a phosphorothioate linkage. In some embodiments, the sense strand comprises modification pattern 24S: 5′-snnnnNfNfnnNfNfnnnnnnnnnsnsn-3′ (SEQ ID NO: 3799), wherein “Nf” is a 2′ fluoro-modified nucleoside, “n” is a 2′ O-methyl modified nucleoside, and “s” is a phosphorothioate linkage. In some embodiments, the sense strand comprises modification pattern 25S: 5′-snnnnnNfNfnNfnnnnnnnnnnsnsn-3′ (SEQ ID NO: 3800), wherein “Nf” is a 2′ fluoro-modified nucleoside, “n” is a 2′ O-methyl modified nucleoside, and “s” is a phosphorothioate linkage. In some embodiments, the sense strand comprises modification pattern 26S: 5′-snnnnnnNfnNfNfnnnnnnnnnsnsn-3′ (SEQ ID NO: 3801), wherein “Nf” is a 2′ fluoro-modified nucleoside, “n” is a 2′ O-methyl modified nucleoside, and “s” is a phosphorothioate linkage. In some embodiments, the sense strand comprises modification pattern 27S: 5′-snnnnnnnNfNfnNfnnnnnnnnsnsn-3′ (SEQ ID NO: 3802), wherein “Nf” is a 2′ fluoro-modified nucleoside, “n” is a 2′ O-methyl modified nucleoside, and “s” is a phosphorothioate linkage. In some embodiments, the sense strand comprises modification pattern 28S: 5′-snnnnnnnnNfnNfnNfnmnnnnsnsn-3′ (SEQ ID NO: 3803), wherein “Nf” is a 2′ fluoro-modified nucleoside, “n” is a 2′ O-methyl modified nucleoside, and “s” is a phosphorothioate linkage. In some embodiments, the sense strand comprises modification pattern 29S: 5′-snnnnnnnNfNfNfNfnnnnnnnnsnsn-3′ (SEQ ID NO: 3804), wherein “Nf” is a 2′ fluoro-modified nucleoside, “n” is a 2′ O-methyl modified nucleoside, and “s” is a phosphorothioate linkage.

[0157] In some embodiments, the composition comprises an oligonucleotide that inhibits the expression of FGG, wherein the oligonucleotide comprises an siRNA comprising a sense strand and an antisense strand, wherein the antisense strand comprises modification pattern 1AS: 5′-nsNfsnNfnNfnNfnNfnnnNfnNfnNfnsnsn-3′ (SEQ ID NO: 3631), wherein “Nf” is a 2′ fluoro-modified nucleoside, “n” is a 2′ O-methyl modified nucleoside, and “s” is a phosphorothioate linkage. In some embodiments, the antisense strand comprises modification pattern 2AS: 5′-nsNfsnnnNfnNfNfnnnnNfnNfnnnsnsn-3′ (SEQ ID NO: 3632), wherein “Nf” is a 2′ fluoro-modified nucleoside, “n” is a 2′ O-methyl modified nucleoside, and “s” is a phosphorothioate linkage. In some embodiments, the antisense strand comprises modification pattern 3AS: 5′-nsNfsnnnNfnnnnnnnNfnNfnnnsnsn-3′ (SEQ ID NO: 3633), wherein “Nf” is a 2′ fluoro-modified nucleoside, “n” is a 2′ O-methyl modified nucleoside, and “s” is a phosphorothioate linkage. In some embodiments, the antisense strand comprises modification pattern 4AS: 5′-nsNfsnNfnNfnnnnnnnNfnNfnnnsnsn-3′ (SEQ ID NO: 3634), wherein “Nf” is a 2′ fluoro-modified nucleoside, “n” is a 2′ O-methyl modified nucleoside, and “s” is a phosphorothioate linkage. In some embodiments, the antisense strand comprises modification pattern 5AS: 5′-nsNfsnnnnnnnnnnnNfnNfnnnsnsn-3′ (SEQ ID NO: 3635), wherein “Nf” is a 2′ fluoro-modified nucleoside, “n” is a 2′ O-methyl modified nucleoside, and “s” is a phosphorothioate linkage. In some embodiments, the antisense strand comprises modification pattern 6AS: 5′-nsNfsnnnNfnnNfnnnnNfnNfnnnsnsn-3′ (SEQ ID NO: 3636), wherein “Nf” is a 2′ fluoro-modified nucleoside, “n” is a 2′ O-methyl modified nucleoside, and “s” is a phosphorothioate linkage. In some embodiments, the antisense strand comprises modification pattern 7AS: 5′-nsNfsnNfnNfnNfnNfnNfnNfnNfnNfnsnsn-3′ (SEQ ID NO: 3637), wherein “Nf” is a 2′ fluoro-modified nucleoside, “n” is a 2′ O-methyl modified nucleoside, and “s” is a phosphorothioate linkage. In some embodiments, the antisense strand comprises modification pattern 8AS: 5′-nsNfsnnnnnnnnnnnNfnnnnnsnsn-3′ (SEQ ID NO: 3638), wherein “Nf” is a 2′ fluoro-modified nucleoside, “n” is a 2′ O-methyl modified nucleoside, and “s” is a phosphorothioate linkage. In some embodiments, the antisense strand comprises modification pattern 9AS: 5′-nNfnNfnNfnNfnNfnNfnNfnNfnNfnsnsn-3′ (SEQ ID NO: 3639), wherein “Nf” is a 2′ fluoro-modified nucleoside, “n” is a 2′ O-methyl modified nucleoside, and “s” is a phosphorothioate linkage. In some embodiments, the antisense strand comprises modification pattern 10AS: 5′-nsNfsnNfnnnNfnNfnNfnNfnNfnNfnsnsn-3′ (SEQ ID NO: 3805), wherein “Nf” is a 2′ fluoro-modified nucleoside, “n” is a 2′ O-methyl modified nucleoside, and “s” is a phosphorothioate linkage. In some embodiments, the antisense strand comprises modification pattern 11AS: 5′-nsNfsnNfnnNfnnNfnNfnNfnNfnNfnsnsn-3′ (SEQ ID NO: 3806), wherein “Nf” is a 2′ fluoro-modified nucleoside, “n” is a 2′ O-methyl modified nucleoside, and “s” is a phosphorothioate linkage. In some embodiments, the antisense strand comprises modification pattern 12AS: 5′-nsNfsndTndNnNfnNfndNnNfndNnNfnsnsn-3′ (SEQ ID NO: 3807), wherein “Nf” is a 2′ fluoro-modified nucleoside, “dT” is deoxythymidine, “n” is a 2′ O-methyl modified nucleoside, and “s” is a phosphorothioate linkage. In some embodiments, the antisense strand comprises modification pattern 13AS: 5′-nsNfsndTndNnNfnNfndNndTndNndTnsnsn-3′ (SEQ ID NO: 3808), wherein “Nf” is a 2′ fluoro-modified nucleoside, “dT” is deoxythymidine, “n” is a 2′ O-methyl modified nucleoside, and “s” is a phosphorothioate linkage. In some embodiments, the antisense strand comprises modification pattern 14AS: 5′-nsNfsnnnNfnnnNfnNfnNfnNfnNfnsnsn-3′ (SEQ ID NO: 3809), wherein “Nf” is a 2′ fluoro-modified nucleoside, “n” is a 2′ O-methyl modified nucleoside, and “s” is a phosphorothioate linkage. In some embodiments, the antisense strand comprises modification pattern 15AS: 5′-dTsNfsnnnNfnNfnNfnNfnNfnNfnNfnsnsn-3′ (SEQ ID NO: 3810), wherein “Nf” is a 2′ fluoro-modified nucleoside, “dT” is deoxythymidine, “n” is a 2′ O-methyl modified nucleoside, and “s” is a phosphorothioate linkage. In some embodiments, the antisense strand comprises modification pattern 16As: 5′-NfsNfsnnnNfnNfnNfnNfnNfnNfnNfnsnsn-3′ (SEQ ID NO: 3811), wherein “Nf” is a 2′ fluoro-modified nucleoside, “n” is a 2′ O-methyl modified nucleoside, and “s” is a phosphorothioate linkage. In some embodiments, the antisense strand comprises modification pattern 17AS: 5′-nsNfsnnnNfnNfnNfnNfnNfnNfnNfnsnsn-3′ (SEQ ID NO: 3812), wherein “Nf” is a 2′ fluoro-modified nucleoside, “n” is a 2′ O-methyl modified nucleoside, and “s” is a phosphorothioate linkage. In some embodiments, the antisense strand comprises modification pattern 18AS: 5′-nsNfsnNfnNfnnnNfnNfnNfnNfnNfnsnsn-3′ (SEQ ID NO: 3813), wherein “Nf” is a 2′ fluoro-modified nucleoside, “n” is a 2′ O-methyl modified nucleoside, and “s” is a phosphorothioate linkage. In some embodiments, the antisense strand comprises modification pattern 19AS: 5′-nsNfsnNfnnNfNfnNfnNfnNfnNfnNfnsnsn-3′ (SEQ ID NO: 3814), wherein “Nf” is a 2′ fluoro-modified nucleoside, “n” is a 2′ O-methyl modified nucleoside, and “s” is a phosphorothioate linkage. In some embodiments, the antisense strand comprises modification pattern 20AS: 5′-nsNfsnNfnnNfnnnnNfnNfnNfnNfnsnsn-3′ (SEQ ID NO: 3815), wherein “Nf” is a 2′ fluoro-modified nucleoside, “n” is a 2′ O-methyl modified nucleoside, and “s” is a phosphorothioate linkage. In some embodiments, the antisense strand comprises modification pattern 21AS: 5′-nsNfsnnnNfnNfnnnNfnNfnNfnNfnsnsn-3′ (SEQ ID NO: 3816), wherein “Nf” is a 2′ fluoro-modified nucleoside, “n” is a 2′ O-methyl modified nucleoside, and “s” is a phosphorothioate linkage.

[0158] In some embodiments, the composition comprises an oligonucleotide that inhibits the expression of FGG, wherein the oligonucleotide comprises an siRNA comprising a sense strand and an antisense strand, wherein the sense strand comprises pattern 1S and the antisense strand comprises pattern 1AS, 2AS, 3AS, 4AS, 5AS, 6AS, 7AS, 8AS, 9AS, 10AS, 11AS, 12AS, 13AS, 14AS, 15AS, 16AS, 17AS, 18AS, 19AS, 20AS, or 21AS. In some embodiments, the sense strand comprises pattern 2S and the antisense strand comprises pattern 1AS, 2AS, 3AS, 4AS, 5AS, 6AS, 7AS, 8AS, 9AS, 10AS, 11AS, 12AS, 13AS, 14AS, 15AS, 16AS, 17AS, 18AS, 19AS, 20AS, or 21AS. In some embodiments, the sense strand comprises pattern 3S and the antisense strand comprises pattern 1AS, 2AS, 3AS, 4AS, 5AS, 6AS, 7AS, 8AS, 9AS, 10AS, 11AS, 12AS, 13AS, 14AS, 15AS, 16AS, 17AS, 18AS, 19AS, 20AS, or 21AS. In some embodiments, the sense strand comprises pattern 4S and the antisense strand comprises pattern 1AS, 2AS, 3AS, 4AS, 5AS, 6AS, 7AS, 8AS, 9AS, 10AS, 11AS, 12AS, 13AS, 14AS, 15AS, 16AS, 17AS, 18AS, 19AS, 20AS, or 21AS. In some embodiments, the sense strand comprises pattern 5S and the antisense strand comprises pattern 1AS, 2AS, 3AS, 4AS, 5AS, 6AS, 7AS, 8AS, 9AS, 10AS, 11AS, 12AS, 13AS, 14AS, 15AS, 16AS, 17AS, 18AS, 19AS, 20AS, or 21AS. In some embodiments, the sense strand comprises pattern 6S and the antisense strand comprises pattern 1AS, 2AS, 3AS, 4AS, 5AS, 6AS, 7AS, 8AS, 9AS, 10AS, 11AS, 12AS, 13AS, 14AS, 15AS, 16AS, 17AS, 18AS, 19AS, 20AS, or 21AS. In some embodiments, the sense strand comprises pattern 7S and the antisense strand comprises pattern 1AS, 2AS, 3AS, 4AS, 5AS, 6AS, 7AS, 8AS, 9AS, 10AS, 11AS, 12AS, 13AS, 14AS, 15AS, 16AS, 17AS, 18AS, 19AS, 20AS, or 21AS. In some embodiments, the sense strand comprises pattern 8S and the antisense strand comprises pattern 1AS, 2AS, 3AS, 4AS, 5AS, 6AS, 7AS, 8AS, 9AS, 10AS, 11AS, 12AS, 13AS, 14AS, 15AS, 16AS, 17AS, 18AS, 19AS, 20AS, or 21AS. In some embodiments, the sense strand comprises pattern 9S and the antisense strand comprises pattern 1AS, 2AS, 3AS, 4AS, 5AS, 6AS, 7AS, 8AS, 9AS, 10AS, 11AS, 12AS, 13AS, 14AS, 15AS, 16AS, 17AS, 18AS, 19AS, 20AS, or 21AS. In some embodiments, the sense strand comprises pattern 10S and the antisense strand comprises pattern 1AS, 2AS, 3AS, 4AS, 5AS, 6AS, 7AS, 8AS, 10AS, 11AS, 12AS, 13AS, 14AS, 15AS, 16AS, 17AS, 18AS, 19AS, 20AS, or 21AS. In some embodiments, the sense strand comprises pattern 11S and the antisense strand comprises pattern 1AS, 2AS, 3AS, 4AS, 5AS, 6AS, 7AS, 8AS, 10AS, 11AS, 12AS, 13AS, 14AS, 15AS, 16AS, 17AS, 18AS, 19AS, 20AS, or 21AS. In some embodiments, the sense strand comprises pattern 12S and the antisense strand comprises pattern 1AS, 2AS, 3AS, 4AS, 5AS, 6AS, 7AS, 8AS, 10AS, 11AS, 12AS, 13AS, 14AS, 15AS, 16AS, 17AS, 18AS, 19AS, 20AS, or 21AS. In some embodiments, the sense strand comprises pattern 13S and the antisense strand comprises pattern 1AS, 2AS, 3AS, 4AS, 5AS, 6AS, 7AS, 8AS, 10AS, 11AS, 12AS, 13AS, 14AS, 15AS, 16AS, 17AS, 18AS, 19AS, 20AS, or 21AS. In some embodiments, the sense strand comprises pattern 14S and the antisense strand comprises pattern 1AS, 2AS, 3AS, 4AS, 5AS, 6AS, 7AS, 8AS, 10AS, 11AS, 12AS, 13AS, 14AS, 15AS, 16AS, 17AS, 18AS, 19AS, 20AS, or 21AS. In some embodiments, the sense strand comprises pattern 15S and the antisense strand comprises pattern 1AS, 2AS, 3AS, 4AS, 5AS, 6AS, 7AS, 8AS, 10AS, 11AS, 12AS, 13AS, 14AS, 15AS, 16AS, 17AS, 18AS, 19AS, 20AS, or 21AS. In some embodiments, the sense strand comprises pattern 16S and the antisense strand comprises pattern 1AS, 2AS, 3AS, 4AS, 5AS, 6AS, 7AS, 8AS, 10AS, 11AS, 12AS, 13AS, 14AS, 15AS, 16AS, 17AS, 18AS, 19AS, 20AS, or 21AS. In some embodiments, the sense strand comprises pattern 17S and the antisense strand comprises pattern 1AS, 2AS, 3AS, 4AS, 5AS, 6AS, 7AS, 8AS, 10AS, 11AS, 12AS, 13AS, 14AS, 15AS, 16AS, 17AS, 18AS, 19AS, 20AS, or 21AS. In some embodiments, the sense strand comprises pattern 18S and the antisense strand comprises pattern 1AS, 2AS, 3AS, 4AS, 5AS, 6AS, 7AS, 8AS, 10AS, 11AS, 12AS, 13AS, 14AS, 15AS, 16AS, 17AS, 18AS, 19AS, 20AS, or 21AS. In some embodiments, the sense strand comprises pattern 19S and the antisense strand comprises pattern 1AS, 2AS, 3AS, 4AS, 5AS, 6AS, 7AS, 8AS, 10AS, 11AS, 12AS, 13AS, 14AS, 15AS, 16AS, 17AS, 18AS, 19AS, 20AS, or 21AS. In some embodiments, the sense strand comprises pattern 20S and the antisense strand comprises pattern 1AS, 2AS, 3AS, 4AS, 5AS, 6AS, 7AS, 8AS, 10AS, 11AS, 12AS, 13AS, 14AS, 15AS, 16AS, 17AS, 18AS, 19AS, 20AS, or 21AS. In some embodiments, the sense strand comprises pattern 21S and the antisense strand comprises pattern 1AS, 2AS, 3AS, 4AS, 5AS, 6AS, 7AS, 8AS, 10AS, 11AS, 12AS, 13AS, 14AS, 15AS, 16AS, 17AS, 18AS, 19AS, 20AS, or 21AS. In some embodiments, the sense strand comprises pattern 22S and the antisense strand comprises pattern 1AS, 2AS, 3AS, 4AS, 5AS, 6AS, 7AS, 8AS, 10AS, 11AS, 12AS, 13AS, 14AS, 15AS, 16AS, 17AS, 18AS, 19AS, 20AS, or 21AS. In some embodiments, the sense strand comprises pattern 23S and the antisense strand comprises pattern 1AS, 2AS, 3AS, 4AS, 5AS, 6AS, 7AS, 8AS, 10AS, 11AS, 12AS, 13AS, 14AS, 15AS, 16AS, 17AS, 18AS, 19AS, 20AS, or 21AS. In some embodiments, the sense strand comprises pattern 24S and the antisense strand comprises pattern 1AS, 2AS, 3AS, 4AS, 5AS, 6AS, 7AS, 8AS, 10AS, 11AS, 12AS, 13AS, 14AS, 15AS, 16AS, 17AS, 18AS, 19AS, 20AS, or 21AS. In some embodiments, the sense strand comprises pattern 25S and the antisense strand comprises pattern 1AS, 2AS, 3AS, 4AS, 5AS, 6AS, 7AS, 8AS, 10AS, 11AS, 12AS, 13AS, 14AS, 15AS, 16AS, 17AS, 18AS, 19AS, 20AS, or 21AS. In some embodiments, the sense strand comprises pattern 26S and the antisense strand comprises pattern 1AS, 2AS, 3AS, 4AS, 5AS, 6AS, 7AS, 8AS, 10AS, 11AS, 12AS, 13AS, 14AS, 15AS, 16AS, 17AS, 18AS, 19AS, 20AS, or 21AS. In some embodiments, the sense strand comprises pattern 27S and the antisense strand comprises pattern 1AS, 2AS, 3AS, 4AS, 5AS, 6AS, 7AS, 8AS, 10AS, 11AS, 12AS, 13AS, 14AS, 15AS, 16AS, 17AS, 18AS, 19AS, 20AS, or 21AS. In some embodiments, the sense strand comprises pattern 28S and the antisense strand comprises pattern 1AS, 2AS, 3AS, 4AS, 5AS, 6AS, 7AS, 8AS, 10AS, 11AS, 12AS, 13AS, 14AS, 15AS, 16AS, 17AS, 18AS, 19AS, 20AS, or 21AS. In some embodiments, the sense strand comprises pattern 29S and the antisense strand comprises pattern 1AS, 2AS, 3AS, 4AS, 5AS, 6AS, 7AS, 8AS, 10AS, 11AS, 12AS, 13AS, 14AS, 15AS, 16AS, 17AS, 18AS, 19AS, 20AS, or 21AS.

[0159] In some embodiments, the sense strand comprises pattern 1S, 2S, 3S, 4S, 5S, 6S, 7S, 8S, 9S, 10S, 11S, 12S, 13S, 14S, 15S, 156S, 17S, 18S, 19S, 20S, 21S, 22S, 23S, 24S, 25S, 28S, or 29S and the antisense strand comprises pattern 1AS. In some embodiments, the sense strand comprises pattern 1S, 2S, 3S, 4S, 5S, 6S, 7S, 8S, 9S, 10S, 11S, 12S, 13S, 14S, 15S, 156S, 17S, 18S, 19S, 20S, 21S, 22S, 23S, 24S, 25S, 28S, or 29S and the antisense strand comprises pattern 2AS. In some embodiments, the sense strand comprises pattern 1S, 2S, 3S, 4S, 5S, 6S, 7S, 8S, 9S, 10S, 11S, 12S, 13S, 14S, 15S, 156S, 17S, 18S, 19S, 20S, 21S, 22S, 23S, 24S, 25S, 28S, or 29S and the antisense strand comprises pattern 3AS. In some embodiments, the sense strand comprises pattern 1S, 2S, 3S, 4S, 5S, 6S, 7S, 8S, 9S, 10S, 11S, 12S, 13S, 14S, 15S, 156S, 17S, 18S, 19S, 20S, 21S, 22S, 23S, 24S, 25S, 28S, or 29S and the antisense strand comprises pattern 4AS. In some embodiments, the sense strand comprises pattern 1S, 2S, 3S, 4S, 5S, 6S, 7S, 8S, 9S, 10S, 11S, 125, 135, 145, 155, 1565, 175, 185, 19S, 20S, 21S, 22S, 23S, 24S, 25S, 28S, or 29S and the antisense strand comprises pattern 5AS. In some embodiments, the sense strand comprises pattern 1S, 2S, 3S, 4S, 5S, 6S, 7S, 8S, 9S, 10S, 11S, 12S, 135, 14S, 15S, 156S, 17S, 18S, 19S, 20S, 21S, 22S, 23S, 24S, 25S, 28S, or 29S and the antisense strand comprises pattern 6AS. In some embodiments, the sense strand comprises pattern 1S, 2S, 3S, 4S, 5S, 6S, 7S, 8S, 9S, 10S, 11S, 12S, 13S, 14S, 15S, 156S, 17S, 18S, 19S, 20S, 21S, 22S, 23S, 24S, 25S, 28S, or 29S and the antisense strand comprises pattern 7AS. In some embodiments, the sense strand comprises pattern 1S, 2S, 3S, 4S, 5S, 6S, 7S, 8S, 9S, 10S, 11S, 12S, 13S, 14S, 15S, 156S, 17S, 18S, 19S, 20S, 21S, 22S, 23S, 24S, 25S, 28S, or 29S and the antisense strand comprises pattern 8AS. In some embodiments, the sense strand comprises pattern 1S, 2S, 3S, 4S, 5S, 6S, 7S, 8S, 9S, 10S, 11S, 12S, 13S, 14S, 15S, 156S, 17S, 18S, 19S, 20S, 21S, 22S, 23S, 24S, 25S, 28S, or 29S and the antisense strand comprises pattern 9AS. In some embodiments, the sense strand comprises pattern 1S, 2S, 3S, 4S, 5S, 6S, 7S, 8S, 9S, 10S, 11S, 12S, 13S, 14S, 15S, 156S, 17S, 18S, 19S, 20S, 21S, 22S, 23S, 24S, 25S, 28S, or 29S and the antisense strand comprises pattern 10AS. In some embodiments, the sense strand comprises pattern 1S, 2S, 3S, 4S, 5S, 6S, 7S, 8S, 9S, 10S, 11S, 12S, 13S, 14S, 15S, 156S, 17S, 18S, 19S, 20S, 21S, 22S, 23S, 24S, 25S, 28S, or 29S and the antisense strand comprises pattern 11AS. In some embodiments, the sense strand comprises pattern 1S, 2S, 3S, 4S, 5S, 6S, 7S, 8S, 9S, 10S, 11S, 12S, 13S, 14S, 155, 156S, 17S, 18S, 19S, 20S, 21S, 22S, 23S, 24S, 25S, 28S, or 29S and the antisense strand comprises pattern 12AS. In some embodiments, the sense strand comprises pattern 1S, 2S, 3S, 4S, 5S, 6S, 7S, 8S, 9S, 10S, 11S, 12S, 13S, 14S, 15S, 156S, 17S, 18S, 19S, 20S, 21S, 22S, 23S, 24S, 25S, 28S, or 29S and the antisense strand comprises pattern 13AS. In some embodiments, the sense strand comprises pattern 1S, 2S, 3S, 4S, 5S, 6S, 7S, 8S, 9S, 10S, 11S, 12S, 13S, 14S, 15S, 156S, 17S, 18S, 19S, 20S, 21S, 22S, 23S, 24S, 25S, 28S, or 29S and the antisense strand comprises pattern 14AS. In some embodiments, the sense strand comprises pattern 1S, 2S, 3S, 4S, 5S, 6S, 7S, 8S, 9S, 10S, 11S, 12S, 13S, 14S, 15S, 156S, 17S, 18S, 19S, 20S, 21S, 22S, 23S, 24S, 25S, 28S, or 29S and the antisense strand comprises pattern 15AS. In some embodiments, the sense strand comprises pattern 1S, 2S, 3S, 4S, 5S, 6S, 7S, 8S, 9S, 10S, 11S, 12S, 13S, 14S, 15S, 156S, 17S, 18S, 19S, 20S, 21S, 22S, 23S, 24S, 25S, 28S, or 29S and the antisense strand comprises pattern 16AS. In some embodiments, the sense strand comprises pattern 1S, 2S, 3S, 4S, 5S, 6S, 7S, 8S, 9S, 10S, 11S, 12S, 13S, 14S, 15S, 156S, 17S, 18S, 19S, 20S, 21S, 22S, 23S, 24S, 25S, 28S, or 29S and the antisense strand comprises pattern 17AS. In some embodiments, the sense strand comprises pattern 1S, 2S, 3S, 4S, 5S, 6S, 7S, 8S, 9S, 10S, 11S, 12S, 13S, 14S, 15S, 156S, 17S, 18S, 19S, 20S, 21S, 22S, 23S, 24S, 25S, 28S, or 29S and the antisense strand comprises pattern 18AS. In some embodiments, the sense strand comprises pattern 1S, 2S, 3S, 4S, 5S, 6S, 7S, 8S, 9S, 10S, 11S, 12S, 13S, 14S, 155, 156S, 17S, 18S, 19S, 20S, 21S, 22S, 23S, 24S, 255, 28S, or 29S and the antisense strand comprises pattern 19AS. In some embodiments, the sense strand comprises pattern 1S, 2S, 3S, 4S, 5S, 6S, 7S, 8S, 9S, 10S, 11S, 12S, 13S, 14S, 15S, 156S, 17S, 18S, 19S, 20S, 21S, 22S, 23S, 24S, 25S, 28S, or 29S and the antisense strand comprises pattern 209AS. In some embodiments, the sense strand comprises pattern 1S, 2S, 3S, 4S, 5S, 6S, 7S, 8S, 9S, 10S, 11S, 12S, 13S, 14S, 15S, 156S, 17S, 18S, 19S, 20S, 21S, 22S, 23S, 24S, 25S, 28S, or 29S and the antisense strand comprises pattern 21AS.

[0160] In some embodiments, the sense strand comprises modification pattern 1AS, 2AS, 3AS, 4AS, 5AS, 6AS, 7AS, 8AS, 9AS, 10AS, 11AS, 12AS, 13AS, 14AS, 15AS, 16AS, 17AS, 18AS, 19AS, 20AS, or 21AS. In some embodiments, the antisense strand comprises modification pattern 1S, 2S, 3S, 4S, 5S, 6S, 7S, 8S, 9S, 10S, 11S, 12S, 13S, 14S, 15S, 156S, 17S, 18S, 19S, 20S, 21S, 22S, 23S, 24S, 25S, 28S, or 29S. In some embodiments, the sense strand or the antisense strand comprises modification pattern ASO1.

[0161] In some embodiments, purines of the sense strand comprise 2′ fluoro modified purines. In some embodiments, purines of the sense strand comprise 2′-O-methyl modified purines. In some embodiments, purines of the sense strand comprise a mixture of 2′ fluoro and 2′-O-methyl modified purines. In some embodiments, all purines of the sense strand comprise 2′ fluoro modified purines. In some embodiments, all purines of the sense strand comprise 2′-O-methyl modified purines. In some embodiments, all purines of the sense strand comprise a mixture of 2′ fluoro and 2′-O-methyl modified purines.

[0162] In some embodiments, pyrimidines of the sense strand comprise 2′ fluoro modified pyrimidines. In some embodiments, pyrimidines of the sense strand comprise 2′-O-methyl modified pyrimidines. In some embodiments, pyrimidines of the sense strand comprise a mixture of 2′ fluoro and 2′-O-methyl modified pyrimidines. In some embodiments, all pyrimidines of the sense strand comprise 2′ fluoro modified pyrimidines. In some embodiments, all pyrimidines of the sense strand comprise 2′-O-methyl modified pyrimidines. In some embodiments, all pyrimidines of the sense strand comprise a mixture of 2′ fluoro and 2′-O-methyl modified pyrimidines.

[0163] In some embodiments, purines of the sense strand comprise 2′ fluoro modified purines, and pyrimidines of the sense strand comprise a mixture of 2′ fluoro and 2′-O-methyl modified pyrimidines. In some embodiments, purines of the sense strand comprise 2′-O-methyl modified purines, and pyrimidines of the sense strand comprise a mixture of 2′ fluoro and 2′-O-methyl modified pyrimidines. In some embodiments, purines of the sense strand comprise 2′ fluoro modified purines, and pyrimidines of the sense strand comprise 2′-O-methyl modified pyrimidines. In some embodiments, purines of the sense strand comprise 2′-O-methyl modified purines, and pyrimidines of the sense strand comprise 2′ fluoro modified pyrimidines. In some embodiments, pyrimidines of the sense strand comprise 2′ fluoro modified pyrimidines, and purines of the sense strand comprise a mixture of 2′ fluoro and 2′-O-methyl modified purines. In some embodiments, pyrimidines of the sense strand comprise 2′-O-methyl modified pyrimidines, and purines of the sense strand comprise a mixture of 2′ fluoro and 2′-O-methyl modified purines. In some embodiments, pyrimidines of the sense strand comprise 2′ fluoro modified pyrimidines, and purines of the sense strand comprise 2′-O-methyl modified purines. In some embodiments, pyrimidines of the sense strand comprise 2′-O-methyl modified pyrimidines, and purines of the sense strand comprise 2′ fluoro modified purines.

[0164] In some embodiments, all purines of the sense strand comprise 2′ fluoro modified purines, and all pyrimidines of the sense strand comprise a mixture of 2′ fluoro and 2′-O-methyl modified pyrimidines. In some embodiments, all purines of the sense strand comprise 2′-O-methyl modified purines, and all pyrimidines of the sense strand comprise a mixture of 2′ fluoro and 2′-O-methyl modified pyrimidines. In some embodiments, all purines of the sense strand comprise 2′ fluoro modified purines, and all pyrimidines of the sense strand comprise 2′-O-methyl modified pyrimidines. In some embodiments, all purines of the sense strand comprise 2′-O-methyl modified purines, and all pyrimidines of the sense strand comprise 2′ fluoro modified pyrimidines. In some embodiments, all pyrimidines of the sense strand comprise 2′ fluoro modified pyrimidines, and all purines of the sense strand comprise a mixture of 2′ fluoro and 2′-O-methyl modified purines. In some embodiments, all pyrimidines of the sense strand comprise 2′-O-methyl modified pyrimidines, and all purines of the sense strand comprise a mixture of 2′ fluoro and 2′-O-methyl modified purines. In some embodiments, all pyrimidines of the sense strand comprise 2′ fluoro modified pyrimidines, and all purines of the sense strand comprise 2′-O-methyl modified purines. In some embodiments, all pyrimidines of the sense strand comprise 2′-O-methyl modified pyrimidines, and all purines of the sense strand comprise 2′ fluoro modified purines.

[0165] In some embodiments, purines of the antisense strand comprise 2′ fluoro modified purines. In some embodiments, purines of the antisense strand comprise 2′-O-methyl modified purines. In some embodiments, purines of the antisense strand comprise a mixture of 2′ fluoro and 2′-O-methyl modified purines. In some embodiments, all purines of the antisense strand comprise 2′ fluoro modified purines. In some embodiments, all purines of the antisense strand comprise 2′-O-methyl modified purines. In some embodiments, all purines of the antisense strand comprise a mixture of 2′ fluoro and 2′-O-methyl modified purines.

[0166] In some embodiments, pyrimidines of the antisense strand comprise 2′ fluoro modified pyrimidines. In some embodiments, pyrimidines of the antisense strand comprise 2′-O-methyl modified pyrimidines. In some embodiments, pyrimidines of the antisense strand comprise a mixture of 2′ fluoro and 2′-O-methyl modified pyrimidines. In some embodiments, all pyrimidines of the antisense strand comprise 2′ fluoro modified pyrimidines. In some embodiments, all pyrimidines of the antisense strand comprise 2′-O-methyl modified pyrimidines. In some embodiments, all pyrimidines of the antisense strand comprise a mixture of 2′ fluoro and 2′-O-methyl modified pyrimidines.

[0167] In some embodiments, purines of the antisense strand comprise 2′ fluoro modified purines, and pyrimidines of the antisense strand comprise a mixture of 2′ fluoro and 2′-O-methyl modified pyrimidines. In some embodiments, purines of the antisense strand comprise 2′-O-methyl modified purines, and pyrimidines of the antisense strand comprise a mixture of 2′ fluoro and 2′-O-methyl modified pyrimidines. In some embodiments, purines of the antisense strand comprise 2′ fluoro modified purines, and pyrimidines of the antisense strand comprise 2′-O-methyl modified pyrimidines. In some embodiments, purines of the antisense strand comprise 2′-O-methyl modified purines, and pyrimidines of the antisense strand comprise 2′ fluoro modified pyrimidines. In some embodiments, pyrimidines of the antisense strand comprise 2′ fluoro modified pyrimidines, and purines of the antisense strand comprise a mixture of 2′ fluoro and 2′-O-methyl modified purines. In some embodiments, pyrimidines of the antisense strand comprise 2′-O-methyl modified pyrimidines, and purines of the antisense strand comprise a mixture of 2′ fluoro and 2′-O-methyl modified purines. In some embodiments, pyrimidines of the antisense strand comprise 2′ fluoro modified pyrimidines, and purines of the antisense strand comprise 2′-O-methyl modified purines. In some embodiments, pyrimidines of the antisense strand comprise 2′-O-methyl modified pyrimidines, and purines of the antisense strand comprise 2′ fluoro modified purines.

[0168] In some embodiments, all purines of the antisense strand comprise 2′ fluoro modified purines, and all pyrimidines of the antisense strand comprise a mixture of 2′ fluoro and 2′-O-methyl modified pyrimidines. In some embodiments, all purines of the antisense strand comprise 2′-O-methyl modified purines, and all pyrimidines of the antisense strand comprise a mixture of 2′ fluoro and 2′-O-methyl modified pyrimidines. In some embodiments, all purines of the antisense strand comprise 2′ fluoro modified purines, and all pyrimidines of the antisense strand comprise 2′-O-methyl modified pyrimidines. In some embodiments, all purines of the antisense strand comprise 2′-O-methyl modified purines, and all pyrimidines of the antisense strand comprise 2′ fluoro modified pyrimidines. In some embodiments, all pyrimidines of the antisense strand comprise 2′ fluoro modified pyrimidines, and all purines of the antisense strand comprise a mixture of 2′ fluoro and 2′-O-methyl modified purines. In some embodiments, all pyrimidines of the antisense strand comprise 2′-O-methyl modified pyrimidines, and all purines of the antisense strand comprise a mixture of 2′ fluoro and 2′-O-methyl modified purines. In some embodiments, all pyrimidines of the antisense strand comprise 2′ fluoro modified pyrimidines, and all purines of the antisense strand comprise 2′-O-methyl modified purines. In some embodiments, all pyrimidines of the antisense strand comprise 2′-O-methyl modified pyrimidines, and all purines of the antisense strand comprise 2′ fluoro modified purines.

[0169] Disclosed herein, in some embodiments, are modified oligonucleotides. The modified oligonucleotide may be an siRNA that includes modifications to the ribose rings, and phosphate linkages. The modifications may be in particular patterns that maximize cell delivery, stability, and efficiency. The siRNA may also include a vinyl phosphonate and a hydrophobic group. These modifications may aid in delivery to a cell or tissue within a subject. The modified oligonucleotide may be used in a method such as a treatment method or a method of reducing gene expression.

[0170] In some embodiments, the oligonucleotide comprises a duplex consisting of 21 nucleotide single strands with base pairing between 19 of the base pairs. In some embodiments, the duplex comprises single-stranded 2 nucleotide overhangs are at the 3′ ends of each strand. One strand (antisense strand) is complementary to a FGG mRNA. Each end of the antisense strand has one to two phosphorothioate bonds. The 5′ end has an optional phosphate mimic such as a vinyl phosphonate. In some embodiments, the oligonucleotide is used to knock down a FGG mRNA or a target protein. In some embodiments, the sense strand has the same sequence as the FGG mRNA. In some embodiments, there are 1-2 phosphorothioates at the 3′ end. In some embodiments, there are 1 or no phosphorothioates at the 5′ end. In some embodiments, there is a hydrophobic conjugate of 12 to 25 carbons attached at the 5′ end via a phosphodiester bond.

[0171] In some cases, the sense strand of any of the siRNAs comprises siRNA with a particular modification pattern. In some embodiments of the modification pattern, position 9 counting from the 5′ end of the sense strand may have a 2′F modification. In some embodiments, when position 9 of the sense strand is a pyrimidine, then all purines in the sense strand have a 2′OMe modification. In some embodiments, when position 9 is the only pyrimidine between positions 5 and 11 of the sense stand, then position 9 is the only position with a 2′F modification in the sense strand. In some embodiments, when position 9 and only one other base between positions 5 and 11 of the sense strand are pyrimidines, then both of these pyrimidines are the only two positions with a 2′F modification in the sense strand. In some embodiments, when position 9 and only two other bases between positions 5 and 11 of the sense strand are pyrimidines, and those two other pyrimidines are in adjacent positions so that there would be not three 2′F modifications in a row, then any combination of 2′F modifications can be made that give three 2′F modifications in total. In some embodiments, when there are more than 2 pyrimidines between positions 5 and 11 of the sense strand, then all combinations of pyrimidines having the 2′F modification are allowed that have three to five 2′F modifications in total, provided that the sense strand does not have three 2′F modifications in a row. In some cases, the sense strand of any of the siRNAs comprises a modification pattern which conforms to any or all of these sense strand rules.

[0172] In some embodiments, when position 9 of the sense strand is a purine, then all purines in the sense strand have a 2′OMe modification. In some embodiments, when position 9 is the only purine between positions 5 and 11 of the sense stand, then position 9 is the only position with a 2′F modification in the sense strand. In some embodiments, when position 9 and only one other base between positions 5 and 11 of the sense strand are purines, then both of these purines are the only two positions with a 2′F modification in the sense strand. In some embodiments, when position 9 and only two other bases between positions 5 and 11 of the sense strand are purines, and those two other purines are in adjacent positions so that there would be not three 2′F modifications in a row, then any combination of 2′F modifications can be made that give three 2′F modifications in total. In some embodiments, when there are more than 2 purines between positions 5 and 11 of the sense strand, then all combinations of purines having the 2′F modification are allowed that have three to five 2′F modifications in total, provided that the sense strand does not have three 2′F modifications in a row. In some cases, the sense strand of any of the siRNAs comprises a modification pattern which conforms to any or all of these sense strand rules.

[0173] In some cases, position 9 of the sense strand can be a 2′deoxy. In these cases, 2′F and 2′OMe modifications may occur at the other positions of the sense strand. In some cases, the sense strand of any of the siRNAs comprises a modification pattern which conforms to these sense strand rules.

[0174] In some cases, the sense strand of any of the siRNAs comprises a modification pattern which conforms to these sense strand rules.

[0175] Disclosed herein, in some embodiments are compositions comprising an oligonucleotide that targets FGG and when administered to a cell decreases expression of FGG, wherein the oligonucleotide comprises a small interfering RNA (siRNA) comprising a sense strand and an antisense strand, wherein the sense strand comprises a sense strand sequence described herein in which at least one internucleoside linkage is modified and at least one nucleoside is modified, or an sense strand sequence comprising 1 or 2 nucleoside substitutions, additions, or deletions of the oligonucleotide sequence in which at least one internucleoside linkage is modified and at least one nucleoside is modified, and wherein the antisense strand comprises an antisense strand sequence described herein in which at least one internucleoside linkage is modified and at least one nucleoside is modified, or an oligonucleotide sequence comprising 1 or 2 nucleoside substitutions, additions, or deletions of the antisense strand sequence in which at least one internucleoside linkage is modified and at least one nucleoside is modified. Some embodiments relate to methods that include administering the composition to a subject.

[0176] In some embodiments, the sense and/or antisense strand comprises a nucleoside sequence at least 70% identical, at least 75% identical, at least 80% identical, at least 85% identical, at least 90% identical, or at least 95% identical, to a sense and/or antisense strand sequence in any of Tables 8-15, 18A, 22A, 26A, 31A, 33A, 37A, 42A, 66A or 81. In some embodiments, the siRNA comprises the sense strand and/or the antisense strand sequence of an siRNA in any of Tables 8-15, 18A, 22A, 26A, 31A, 33A, 37A, 42A, 66A or 81 or a nucleic acid sequence thereof having 3 or 4 nucleoside substitutions, additions, or deletions. In some embodiments, the siRNA comprises the sense strand and/or the antisense strand sequence of an siRNA in any of Tables 8-15, 18A, 22A, 26A, 31A, 33A, 37A, 42A, 66A or 81 or a nucleic acid sequence thereof having 1 or 2 nucleoside substitutions, additions, or deletions. In some embodiments, the siRNA comprises the sense strand and/or the antisense strand sequence of an siRNA in any of Tables 8-15, 18A, 22A, 26A, 31A, 33A, 37A, 42A, 66A or 81. The siRNA may include the same internucleoside linkage modifications or nucleoside modifications as those in any of Tables 8-15, 18A, 22A, 26A, 31A, 33A, 37A, 42A, 66A or 81. The siRNA may include any different internucleoside linkage modifications or nucleoside modifications different from those in any of Tables 8-15, 18A, 22A, 26A, 31A, 33A, 37A, 42A, 66A or 81. The siRNA may include some unmodified internucleoside linkages or nucleosides.

[0177] In some embodiments, the sense and/or antisense strand comprises a nucleoside sequence at least 70% identical, at least 75% identical, at least 80% identical, at least 85% identical, at least 90% identical, or at least 95% identical, to a sense and/or antisense strand sequence in Table 8A. In some embodiments, the siRNA comprises the sense strand and/or the antisense strand sequence of an siRNA in Table 8A or a nucleic acid sequence thereof having 3 or 4 nucleoside substitutions, additions, or deletions. In some embodiments, the siRNA comprises the sense strand and/or the antisense strand sequence of an siRNA in Table 8A or a nucleic acid sequence thereof having 1 or 2 nucleoside substitutions, additions, or deletions. In some embodiments, the siRNA comprises the sense strand and/or the antisense strand sequence of an siRNA in Table 8A. The siRNA may include the same internucleoside linkage modifications or nucleoside modifications as those in Table 8A. The siRNA may include any different internucleoside linkage modifications or nucleoside modifications different from those in Table 8A. The siRNA may include some unmodified internucleoside linkages or nucleosides.

[0178] In some embodiments, the sense and/or antisense strand comprises a nucleoside sequence at least 70% identical, at least 75% identical, at least 80% identical, at least 85% identical, at least 90% identical, or at least 95% identical, to a sense and/or antisense strand sequence in Table 8B. In some embodiments, the siRNA comprises the sense strand and/or the antisense strand sequence of an siRNA in Table 8B or a nucleic acid sequence thereof having 3 or 4 nucleoside substitutions, additions, or deletions. In some embodiments, the siRNA comprises the sense strand and/or the antisense strand sequence of an siRNA in Table 8B or a nucleic acid sequence thereof having 1 or 2 nucleoside substitutions, additions, or deletions. In some embodiments, the siRNA comprises the sense strand and/or the antisense strand sequence of an siRNA in Table 8B. The siRNA may include the same internucleoside linkage modifications or nucleoside modifications as those in Table 8B. The siRNA may include any different internucleoside linkage modifications or nucleoside modifications different from those in Table 8B. The siRNA may include some unmodified internucleoside linkages or nucleosides.

[0179] In some embodiments, the sense and/or antisense strand comprises a nucleoside sequence at least 70% identical, at least 75% identical, at least 80% identical, at least 85% identical, at least 90% identical, or at least 95% identical, to a sense and/or antisense strand sequence in Table 81. In some embodiments, the siRNA comprises the sense strand and/or the antisense strand sequence of an siRNA in Table 81 or a nucleic acid sequence thereof having 3 or 4 nucleoside substitutions, additions, or deletions. In some embodiments, the siRNA comprises the sense strand and/or the antisense strand sequence of an siRNA in Table 81 or a nucleic acid sequence thereof having 1 or 2 nucleoside substitutions, additions, or deletions. In some embodiments, the siRNA comprises the sense strand and/or the antisense strand sequence of an siRNA in Table 81. The siRNA may include the same internucleoside linkage modifications or nucleoside modifications as those in Table 81. The siRNA may include any different internucleoside linkage modifications or nucleoside modifications different from those in Table 81. The siRNA may include some unmodified internucleoside linkages or nucleosides.

[0180] In some embodiments, the sense strand comprises a nucleoside sequence at least 70% identical, at least 75% identical, at least 80% identical, at least 85% identical, at least 90% identical, or at least 95% identical, to any one of SEQ ID NOs: 3591-3594. In some embodiments, the sense strand comprises the nucleoside sequence of any one of SEQ ID NOS: 3591-3594, or a sense strand sequence thereof having 1 or 2 nucleoside substitutions, additions, or deletions. In some embodiments, the sense strand comprises the nucleoside sequence of any one of SEQ ID NOS: 3591-3594, and 3 or 4 nucleoside substitutions, additions, or deletions. In some embodiments, the sense strand comprises the nucleoside sequence of any one of SEQ ID NOS: 3591-3594. The sense strand may include any different internucleoside linkage modifications or nucleoside modifications different from those in SEQ ID NOS: 3591-3594. The sense strand may include some unmodified internucleoside linkages or nucleosides. The sense strand may include GalNAc1 or another GalNAc moiety.

[0181] In some embodiments, the sense strand comprises a nucleoside sequence at least 85% identical to SEQ ID NO: 3591. In some embodiments, the sense strand comprises the nucleoside sequence of SEQ ID NO: 3591, or a sense strand sequence thereof having 1 or 2 nucleoside substitutions, additions, or deletions. In some embodiments, the sense strand comprises the nucleoside sequence of SEQ ID NO: 3591, and 3 or 4 nucleoside substitutions, additions, or deletions. In some embodiments, the sense strand comprises the nucleoside sequence of SEQ ID NO: 3591. The sense strand may include any different internucleoside linkage modifications or nucleoside modifications different from those in SEQ ID NO: 3591. The sense strand may include some unmodified internucleoside linkages or nucleosides. The sense strand may include GalNAc1 or another GalNAc moiety.

[0182] In some embodiments, the sense strand comprises a nucleoside sequence at least 85% identical to SEQ ID NO: 3592. In some embodiments, the sense strand comprises the nucleoside sequence of SEQ ID NO: 3592, or a sense strand sequence thereof having 1 or 2 nucleoside substitutions, additions, or deletions. In some embodiments, the sense strand comprises the nucleoside sequence of SEQ ID NO: 3592, and 3 or 4 nucleoside substitutions, additions, or deletions. In some embodiments, the sense strand comprises the nucleoside sequence of SEQ ID NO: 3592. The sense strand may include any different internucleoside linkage modifications or nucleoside modifications different from those in SEQ ID NO: 3592. The sense strand may include some unmodified internucleoside linkages or nucleosides. The sense strand may include GalNAc1 or another GalNAc moiety.

[0183] In some embodiments, the sense strand comprises a nucleoside sequence at least 85% identical to SEQ ID NO: 3593. In some embodiments, the sense strand comprises the nucleoside sequence of SEQ ID NO: 3593, or a sense strand sequence thereof having 1 or 2 nucleoside substitutions, additions, or deletions. In some embodiments, the sense strand comprises the nucleoside sequence of SEQ ID NO: 3593, and 3 or 4 nucleoside substitutions, additions, or deletions. In some embodiments, the sense strand comprises the nucleoside sequence of SEQ ID NO: 3593. The sense strand may include any different internucleoside linkage modifications or nucleoside modifications different from those in SEQ ID NO: 3593. The sense strand may include some unmodified internucleoside linkages or nucleosides. The sense strand may include GalNAc1 or another GalNAc moiety.

[0184] In some embodiments, the sense strand comprises a nucleoside sequence at least 85% identical to SEQ ID NO: 3594. In some embodiments, the sense strand comprises the nucleoside sequence of SEQ ID NO: 3594, or a sense strand sequence thereof having 1 or 2 nucleoside substitutions, additions, or deletions. In some embodiments, the sense strand comprises the nucleoside sequence of SEQ ID NO: 3594, and 3 or 4 nucleoside substitutions, additions, or deletions. In some embodiments, the sense strand comprises the nucleoside sequence of SEQ ID NO: 3594. The sense strand may include any different internucleoside linkage modifications or nucleoside modifications different from those in SEQ ID NO: 3594. The sense strand may include some unmodified internucleoside linkages or nucleosides. The sense strand may include GalNAc1 or another GalNAc moiety.

[0185] In some embodiments, the sense strand comprises a nucleoside sequence at least 70% identical, at least 75% identical, at least 80% identical, at least 85% identical, at least 90% identical, or at least 95% identical, to any one of SEQ ID NOs: 3641-3676. In some embodiments, the sense strand comprises the nucleoside sequence of any one of SEQ ID NOS: 3641-3676, or a sense strand sequence thereof having 1 or 2 nucleoside substitutions, additions, or deletions. In some embodiments, the sense strand comprises the nucleoside sequence of any one of SEQ ID NOS: 3641-3676, and 3 or 4 nucleoside substitutions, additions, or deletions. In some embodiments, the sense strand comprises the nucleoside sequence of any one of SEQ ID NOS: 3641-3676. The sense strand may include any different internucleoside linkage modifications or nucleoside modifications different from those in SEQ ID NOS: 3641-3676. The sense strand may include some unmodified internucleoside linkages or nucleosides. The sense strand may include GalNAc1 or another GalNAc moiety.

[0186] In some embodiments, the sense strand comprises a nucleoside sequence at least 85% identical to SEQ ID NO: 3651. In some embodiments, the sense strand comprises the nucleoside sequence of SEQ ID NO: 3651, or a sense strand sequence thereof having 1 or 2 nucleoside substitutions, additions, or deletions. In some embodiments, the sense strand comprises the nucleoside sequence of SEQ ID NO: 3651, and 3 or 4 nucleoside substitutions, additions, or deletions. In some embodiments, the sense strand comprises the nucleoside sequence of SEQ ID NO: 3651. The sense strand may include any different internucleoside linkage modifications or nucleoside modifications different from those in SEQ ID NO: 3651. The sense strand may include some unmodified internucleoside linkages or nucleosides. The sense strand may include GalNAc1 or another GalNAc moiety.

[0187] In some embodiments, the sense strand comprises a nucleoside sequence at least 85% identical to SEQ ID NO: 3652. In some embodiments, the sense strand comprises the nucleoside sequence of SEQ ID NO: 3652, or a sense strand sequence thereof having 1 or 2 nucleoside substitutions, additions, or deletions. In some embodiments, the sense strand comprises the nucleoside sequence of SEQ ID NO: 3652, and 3 or 4 nucleoside substitutions, additions, or deletions. In some embodiments, the sense strand comprises the nucleoside sequence of SEQ ID NO: 3652. The sense strand may include any different internucleoside linkage modifications or nucleoside modifications different from those in SEQ ID NO: 3652. The sense strand may include some unmodified internucleoside linkages or nucleosides. The sense strand may include GalNAc1 or another GalNAc moiety.

[0188] In some embodiments, the sense strand comprises a nucleoside sequence at least 85% identical to SEQ ID NO: 3654. In some embodiments, the sense strand comprises the nucleoside sequence of SEQ ID NO: 3654, or a sense strand sequence thereof having 1 or 2 nucleoside substitutions, additions, or deletions. In some embodiments, the sense strand comprises the nucleoside sequence of SEQ ID NO: 3654, and 3 or 4 nucleoside substitutions, additions, or deletions. In some embodiments, the sense strand comprises the nucleoside sequence of SEQ ID NO: 3654. The sense strand may include any different internucleoside linkage modifications or nucleoside modifications different from those in SEQ ID NO: 3594. The sense strand may include some unmodified internucleoside linkages or nucleosides. The sense strand may include GalNAc1 or another GalNAc moiety.

[0189] In some embodiments, the sense strand comprises a nucleoside sequence at least 85% identical to SEQ ID NO: 3675. In some embodiments, the sense strand comprises the nucleoside sequence of SEQ ID NO: 3675, or a sense strand sequence thereof having 1 or 2 nucleoside substitutions, additions, or deletions. In some embodiments, the sense strand comprises the nucleoside sequence of SEQ ID NO: 3675, and 3 or 4 nucleoside substitutions, additions, or deletions. In some embodiments, the sense strand comprises the nucleoside sequence of SEQ ID NO: 3675. The sense strand may include any different internucleoside linkage modifications or nucleoside modifications different from those in SEQ ID NO: 3675. The sense strand may include some unmodified internucleoside linkages or nucleosides. The sense strand may include GalNAc1 or another GalNAc moiety.

[0190] In some embodiments, the antisense strand comprises a nucleoside sequence at least 70% identical, at least 75% identical, at least 80% identical, at least 85% identical, at least 90% identical, or at least 95% identical, to any one of SEQ ID NOs: 3595-3598. In some embodiments, the antisense strand comprises the nucleoside sequence of any one of SEQ ID NOS: 3595-3598, or an antisense strand sequence thereof having 1 or 2 nucleoside substitutions, additions, or deletions. In some embodiments, the antisense strand comprises the nucleoside sequence of any one of SEQ ID NOS: 3595-3598, and 3 or 4 nucleoside substitutions, additions, or deletions. In some embodiments, the antisense strand comprises the nucleoside sequence of any one of SEQ ID NOS: 3595-3598. The antisense strand may include any different internucleoside linkage modifications or nucleoside modifications different from those in SEQ ID NOS: 3595-3598. The antisense strand may include some unmodified internucleoside linkages or nucleosides. The antisense strand may include a GalNAc moiety.

[0191] In some embodiments, the antisense strand comprises a nucleoside sequence at least 85% identical to SEQ ID NO: 3595. In some embodiments, the antisense strand comprises the nucleoside sequence of SEQ ID NO: 3595, or an antisense strand sequence thereof having 1 or 2 nucleoside substitutions, additions, or deletions. In some embodiments, the antisense strand comprises the nucleoside sequence of SEQ ID NO: 3595, and 3 or 4 nucleoside substitutions, additions, or deletions. In some embodiments, the antisense strand comprises the nucleoside sequence of SEQ ID NO: 3595. The antisense strand may include any different internucleoside linkage modifications or nucleoside modifications different from those in SEQ ID NO: 3595. The antisense strand may include some unmodified internucleoside linkages or nucleosides. The antisense strand may include a GalNAc moiety.

[0192] In some embodiments, the antisense strand comprises a nucleoside sequence at least 85% identical to SEQ ID NO: 3596. In some embodiments, the antisense strand comprises the nucleoside sequence of SEQ ID NO: 3596, or an antisense strand sequence thereof having 1 or 2 nucleoside substitutions, additions, or deletions. In some embodiments, the antisense strand comprises the nucleoside sequence of SEQ ID NO: 3596, and 3 or 4 nucleoside substitutions, additions, or deletions. In some embodiments, the antisense strand comprises the nucleoside sequence of SEQ ID NO: 3596. The antisense strand may include any different internucleoside linkage modifications or nucleoside modifications different from those in SEQ ID NO: 3596. The antisense strand may include some unmodified internucleoside linkages or nucleosides. The antisense strand may include a GalNAc moiety.

[0193] In some embodiments, the antisense strand comprises a nucleoside sequence at least 85% identical to SEQ ID NO: 3597. In some embodiments, the antisense strand comprises the nucleoside sequence of SEQ ID NO: 3597, or an antisense strand sequence thereof having 1 or 2 nucleoside substitutions, additions, or deletions. In some embodiments, the antisense strand comprises the nucleoside sequence of SEQ ID NO: 3597, and 3 or 4 nucleoside substitutions, additions, or deletions. In some embodiments, the antisense strand comprises the nucleoside sequence of SEQ ID NO: 3597. The antisense strand may include any different internucleoside linkage modifications or nucleoside modifications different from those in SEQ ID NO: 3597. The antisense strand may include some unmodified internucleoside linkages or nucleosides. The antisense strand may include a GalNAc moiety.

[0194] In some embodiments, the antisense strand comprises a nucleoside sequence at least 85% identical to SEQ ID NO: 3598. In some embodiments, the antisense strand comprises the nucleoside sequence of SEQ ID NO: 3598, or an antisense strand sequence thereof having 1 or 2 nucleoside substitutions, additions, or deletions. In some embodiments, the antisense strand comprises the nucleoside sequence of SEQ ID NO: 3598, and 3 or 4 nucleoside substitutions, additions, or deletions. In some embodiments, the antisense strand comprises the nucleoside sequence of SEQ ID NO: 3598. The antisense strand may include any different internucleoside linkage modifications or nucleoside modifications different from those in SEQ ID NO: 3598. The antisense strand may include some unmodified internucleoside linkages or nucleosides. The antisense strand may include a GalNAc moiety.

[0195] In some embodiments, the antisense strand comprises a nucleoside sequence at least 70% identical, at least 75% identical, at least 80% identical, at least 85% identical, at least 90% identical, or at least 95% identical, to any one of SEQ ID NOs: 3677-3712. In some embodiments, the antisense strand comprises the nucleoside sequence of any one of SEQ ID NOS: 3677-3712, or an antisense strand sequence thereof having 1 or 2 nucleoside substitutions, additions, or deletions. In some embodiments, the antisense strand comprises the nucleoside sequence of any one of SEQ ID NOS: 3677-3712, and 3 or 4 nucleoside substitutions, additions, or deletions. In some embodiments, the antisense strand comprises the nucleoside sequence of any one of SEQ ID NOS: 3677-3712. The antisense strand may include any different internucleoside linkage modifications or nucleoside modifications different from those in SEQ ID NOS: 3677-3712. The antisense strand may include some unmodified internucleoside linkages or nucleosides. The antisense strand may include a GalNAc moiety.

[0196] In some embodiments, the antisense strand comprises a nucleoside sequence at least 85% identical to SEQ ID NO: 3687. In some embodiments, the antisense strand comprises the nucleoside sequence of SEQ ID NO: 3687, or an antisense strand sequence thereof having 1 or 2 nucleoside substitutions, additions, or deletions. In some embodiments, the antisense strand comprises the nucleoside sequence of SEQ ID NO: 3687, and 3 or 4 nucleoside substitutions, additions, or deletions. In some embodiments, the antisense strand comprises the nucleoside sequence of SEQ ID NO: 3687. The antisense strand may include any different internucleoside linkage modifications or nucleoside modifications different from those in SEQ ID NO: 3687. The antisense strand may include some unmodified internucleoside linkages or nucleosides. The antisense strand may include a GalNAc moiety.

[0197] In some embodiments, the antisense strand comprises a nucleoside sequence at least 85% identical to SEQ ID NO: 3688. In some embodiments, the antisense strand comprises the nucleoside sequence of SEQ ID NO: 3688, or an antisense strand sequence thereof having 1 or 2 nucleoside substitutions, additions, or deletions. In some embodiments, the antisense strand comprises the nucleoside sequence of SEQ ID NO: 3688, and 3 or 4 nucleoside substitutions, additions, or deletions. In some embodiments, the antisense strand comprises the nucleoside sequence of SEQ ID NO: 3688. The antisense strand may include any different internucleoside linkage modifications or nucleoside modifications different from those in SEQ ID NO: 3688. The antisense strand may include some unmodified internucleoside linkages or nucleosides. The antisense strand may include a GalNAc moiety.

[0198] In some embodiments, the antisense strand comprises a nucleoside sequence at least 85% identical to SEQ ID NO: 3690. In some embodiments, the antisense strand comprises the nucleoside sequence of SEQ ID NO: 3690, or an antisense strand sequence thereof having 1 or 2 nucleoside substitutions, additions, or deletions. In some embodiments, the antisense strand comprises the nucleoside sequence of SEQ ID NO: 3690, and 3 or 4 nucleoside substitutions, additions, or deletions. In some embodiments, the antisense strand comprises the nucleoside sequence of SEQ ID NO: 3690. The antisense strand may include any different internucleoside linkage modifications or nucleoside modifications different from those in SEQ ID NO: 3690. The antisense strand may include some unmodified internucleoside linkages or nucleosides. The antisense strand may include a GalNAc moiety.

[0199] In some embodiments, the antisense strand comprises a nucleoside sequence at least 85% identical to SEQ ID NO: 3747. In some embodiments, the antisense strand comprises the nucleoside sequence of SEQ ID NO: 3747, or an antisense strand sequence thereof having 1 or 2 nucleoside substitutions, additions, or deletions. In some embodiments, the antisense strand comprises the nucleoside sequence of SEQ ID NO: 3747, and 3 or 4 nucleoside substitutions, additions, or deletions. In some embodiments, the antisense strand comprises the nucleoside sequence of SEQ ID NO: 3747. The antisense strand may include any different internucleoside linkage modifications or nucleoside modifications different from those in SEQ ID NO: 3747. The antisense strand may include some unmodified internucleoside linkages or nucleosides. The antisense strand may include a GalNAc moiety.

### 4. ASO Modification Patterns

[0200] In some embodiments, the composition comprises an oligonucleotide that inhibits the expression of FGG, wherein the oligonucleotide comprises an antisense oligonucleotide (ASO). In some embodiments, the ASO comprises modification pattern ASO1: 5′-nsnsnsnsnsdNsdNsdNsdNsdNsdNsdNsdNsdNsdNsnsnsnsnsn-3′ (SEQ ID NO: 3640), wherein “dN” is any deoxynucleotide, “n” is a 2′O-methyl or 2′O-methoxyethyl-modified nucleoside, and “s” is a phosphorothioate linkage. In some embodiments, the ASO comprises modification pattern 1S, 2S, 3S, 4S, 5S, 6S, 7S, 8S, 9S, 10S, 11S, 12S, 13S, 14S, 15S, 156S, 17S, 18S, 19S, 20S, 21S, 22S, 23S, 24S, 25S, 28S, 29S, 1AS, 2AS, 3AS, 4AS, 5AS, 6AS, 7AS, 8AS, 9AS, 10AS, 11AS, 12AS, 13AS, 14AS, 15AS, 16AS, 17AS, 18AS, 19AS, 20AS, or 21AS.

### D. Formulations

[0201] In some embodiments, the composition is a pharmaceutical composition. In some embodiments, the composition is sterile. In some embodiments, the composition further comprises a pharmaceutically acceptable carrier.

[0202] In some embodiments, the pharmaceutically acceptable carrier comprises water. In some embodiments, the pharmaceutically acceptable carrier comprises a buffer. In some embodiments, the pharmaceutically acceptable carrier comprises a saline solution. In some embodiments, the pharmaceutically acceptable carrier comprises water, a buffer, or a saline solution. In some embodiments, the composition comprises a liposome. In some embodiments, the pharmaceutically acceptable carrier comprises liposomes, lipids, nanoparticles, proteins, protein-antibody complexes, peptides, cellulose, nanogel, or a combination thereof.

### II. Methods and Uses

[0203] Disclosed herein, in some embodiments, are methods of administering a composition described herein to a subject. Some embodiments relate to use a composition described herein, such as administering the composition to a subject.

[0204] Some embodiments relate to a method of treating a disease or disorder (e.g., mental disorder (e.g., psychiatric disorder or neurological disorder)) in a subject in need thereof. Some embodiments relate to use of a composition described herein in the method of treatment. Some embodiments include administering a composition described herein to a subject with the disorder. In some embodiments, the administration treats the disorder in the subject. In some embodiments, the composition treats the disorder in the subject.

[0205] In some embodiments, the treatment comprises prevention, inhibition, or reversion of the disorder (e.g., mental disorder (e.g., psychiatric disorder or neurological disorder)) in the subject. Some embodiments relate to use of a composition described herein in the method of preventing, inhibiting, or reversing the disorder. Some embodiments relate to a method of preventing, inhibiting, or reversing a disorder in a subject in need thereof. Some embodiments include administering a composition described herein to a subject with the disorder. In some embodiments, the administration prevents, inhibits, or reverses the disorder in the subject. In some embodiments, the composition prevents, inhibits, or reverses the disorder in the subject.

[0206] Some embodiments relate to a method of preventing a disorder (e.g., mental disorder (e.g., psychiatric disorder or neurological disorder)) in a subject in need thereof. Some embodiments relate to use of a composition described herein in the method of preventing the disorder. Some embodiments include administering a composition described herein to a subject with the disorder. In some embodiments, the administration prevents the disorder in the subject. In some embodiments, the composition prevents the disorder in the subject.

[0207] Some embodiments relate to a method of inhibiting a disorder (e.g., mental disorder (e.g., psychiatric disorder or neurological disorder)) in a subject in need thereof. Some embodiments relate to use of a composition described herein in the method of inhibiting the disorder. Some embodiments include administering a composition described herein to a subject with the disorder. In some embodiments, the administration inhibits the disorder in the subject. In some embodiments, the composition inhibits the disorder in the subject.

[0208] Some embodiments relate to a method of reversing a disorder (e.g., mental disorder (e.g., psychiatric disorder or neurological disorder)) in a subject in need thereof. Some embodiments relate to use of a composition described herein in the method of reversing the disorder. Some embodiments include administering a composition described herein to a subject with the disorder. In some embodiments, the administration reverses the disorder in the subject. In some embodiments, the composition reverses the disorder in the subject.

[0209] In some embodiments, the administration is systemic. In some embodiments, the administration is intravenous. In some embodiments, the administration is by injection.

### A. Disorders

[0210] Some embodiments of the methods described herein include treating a disorder in a subject in need thereof. A disorder can include a disease. In some embodiments, the disorder is a mental disorder. In some embodiments, the mental disorder is a psychiatric disorder or neurological disorder. The psychiatric disorder or neurological disorder may comprise a hepatic disorder, a brain disorder, a CNS disorder, a CSF disorder, or a combination thereof.

[0211] In some embodiments, the disorder comprises a psychiatric disorder. Non-limiting examples of psychiatric disorders include depressive disorders, such as major depressive disorder, persistent depressive disorder, treatment resistant depression and signs or symptoms of depression. Further non-limiting examples of psychiatric disorders include post-traumatic stress disorder, mood disorders, anxiety disorders (e.g., generalized anxiety disorder, obsessive-compulsive disorder, panic disorder, social phobia, etc.), eating disorders, substance-use disorders (e.g., alcohol use disorders, prescription medicines use disorders, illegal drug use disorders, psychoactive substance-use disorders, etc.) bipolar disorder, personality disorders, schizophrenia and schizoaffective disorders.

[0212] In some embodiments, the disorder is a depressive disorder. Examples of depressive disorders include major depressive disorder, persistent depressive disorder, or treatment resistant depression. In some embodiments, the depressive disorder comprises or consists of major depressive disorder. In some embodiments, the depressive disorder comprises or consists of persistent depressive disorder. In some embodiments, the depressive disorder comprises or consists of treatment resistant depression. In some embodiments, the depressive disorder is treatment resistant depression. Treatment resistant depression may include depression that does not respond (e.g., within an acceptable period of time) to first, second, or third line treatments. In some embodiments, the disorder includes a sign or symptom of depression. Exemplary signs or symptoms of depression may include a persistent feeling of sadness or loss of interest, apathy, feelings of hopelessness and sadness, anxiety, agitation, and restlessness. Exemplary signs or symptoms of depression may be any sign or symptom of depression within the Diagnostic and Statistical Manual of Mental Disorders (DSM-5), which is hereby incorporated by reference.

[0213] In some embodiments, the disorder comprises post-traumatic stress disorder (PTSD). Exemplary signs or symptoms of PTSD include recurrent, unwanted distressing memories of the traumatic event, flashbacks, upsetting dreams or nightmares about the traumatic event, negative thoughts about yourself, other people or the world, memory problems, difficulty experiencing positive emotions, or feeling emotionally numb. Exemplary signs or symptoms of PTSD may be any sign or symptom of PTSD within the DSM-5.

[0214] In some embodiments, the disorder comprises mood disorders. An exemplary mood disorder includes dysthymia. In some embodiments, the disorder comprises anxiety disorders. Exemplary anxiety disorders include generalized anxiety disorder (GAD), obsessive-compulsive disorder (OCD), panic disorder, social phobias, and social anxiety disorder. Signs or symptoms of anxiety disorders include a feeling of restlessness, being easily fatigued, having difficulty concentration, and being irritable. Exemplary signs or symptoms of anxiety disorders (e.g., GAD, OCT, etc.) may be any sign or symptom of anxiety disorders within the DSM-5.

[0215] In some embodiments, the disorder comprises eating disorders. Exemplary eating disorders include anorexia nervosa, bulimia nervosa, and binge-eating disorder. Exemplary signs and symptoms of eating disorders include extremely restricted eating, emaciation, intense fear of gaining weight, brittle nails and hair, eating unusually large amounts of food in a specific amount of time, such as a 2-hour period, eating even when you're full or not hungry, and eating until you're uncomfortably full. Exemplary signs or symptoms of eating disorders may be any sign or symptom of eating disorders within the DSM-5.

[0216] In some embodiments, the disorder comprises substance-use disorders. Exemplary substance-use disorders include alcohol-use disorder, prescription drug use disorder, illegal drug use disorder, solvent abuse, and “legal high” abuse. Exemplary signs and symptoms of substance-use disorders include intense urges for the substance that block out other thoughts, needing more of the substance to get the same effect over time, and failure in attempts to stop using the substance. Exemplary signs or symptoms of substance-use disorders may be any sign or symptom of substance-use disorders within the DSM-5.

[0217] In some embodiments, the disorder comprises bipolar disorder. In some embodiments, the bipolar disorder comprises bipolar I disorder. In some embodiments, the bipolar disorder comprises bipolar II disorder. In some embodiments, the bipolar disorder comprises cyclothymic bipolar disorder. In some embodiments, the bipolar disorder comprises mixed feature bipolar disorder. Exemplary signs and symptoms of bipolar disorder include experiencing a manic episode and experiencing a major depressive episode. Exemplary signs or symptoms of bipolar disorder may be any sign or symptom of bipolar disorder within the DSM-5.

[0218] In some embodiments, the disorder comprises a personality disorder. Exemplary personality disorders include borderline personality disorder, antisocial personality disorder, histrionic personality disorder, narcissistic personality disorder, avoidant personality disorder, and schizoid personality disorder. Exemplary signs and symptoms of personality disorders include impulsive and risky behavior, unstable or fragile self-image, up and down moods, and suicidal behavior or threats of self-injury. Exemplary signs or symptoms of personality disorder may be any sign or symptom of personality disorder within the DSM-5.

[0219] In some embodiments, the disorder comprises schizophrenia. Exemplary schizophrenia signs and symptoms include delusions, hallucinations, disorganized thinking, and loss of interest or motivation in life. In some embodiments, the signs and symptoms comprise positive symptoms (e.g., hallucinations or delusions). In some embodiments, the signs and symptoms comprise negative symptoms (e.g., lack of interest or emotionally flat). Exemplary signs or symptoms of schizophrenia may be any sign or symptom of schizophrenia within the DSM-5.

[0220] In some embodiments, the disorder comprises schizoaffective disorders. Exemplary schizoaffective disorders include the bipolar type schizoaffective disorder and depressive type schizoaffective disorder. Exemplary signs and symptoms of schizoaffective disorders include delusions, hallucinations, impaired communication, and bizarre or unusual behavior. Exemplary signs or symptoms of schizoaffective disorders may be any sign or symptom of schizoaffective disorders within the DSM-5.

[0221] In some embodiments, the disorder comprises a neurological disorder. Non-limiting examples of neurological disorders include Alzheimer's disease, dementia, cognitive decline, vascular dementia. Further non-limiting examples of neurological disorders include headache, migraine (e.g., with aura and/or without aura), chronic pain, fibromyalgia, chronic fatigue syndrome (e.g. myalgic encephalomyelitis), motor neuron disease (e.g., Amyotrophic Lateral Sclerosis (ALS)).

[0222] In some embodiments, the disorder comprises dementia. In some embodiments, dementia comprises vascular dementia. In some embodiments, dementia comprises lewy body dementia. In some embodiments, dementia comprises frontotemporal dementia. In some embodiments, dementia comprises Alzheimer's disease. In some embodiments, dementia comprises mixed dementia. Exemplary signs and symptoms of dementia include memory loss, difficulty communicating, difficulty with visual and spatial abilities, difficulty reasoning or problem-solving, difficulty with coordination and motor functions, and confusion and disorientation.

[0223] In some embodiments, Alzheimer's disease comprises early-onset Alzheimer's disease. Early-onset Alzheimer's disease may occur in subjects under the age of 65 years old. In some embodiments, Alzheimer's disease comprises late-onset Alzheimer's disease. In some embodiments, Alzheimer's disease comprises common Alzheimer's disease. In some embodiments, Alzheimer's disease comprises genetic Alzheimer's disease. Exemplary signs and symptoms of Alzheimer's disease include increased memory loss and confusion, inability to learn new things, difficulty with language, difficulty organizing thoughts and thinking logically, shortened attention span, and problems coping with new situations.

[0224] In some embodiments, the disorder comprises delirium. Exemplary forms of delirium include hyperactive delirium, hypoactive delirium, and mixed delirium. Exemplary signs and symptoms of delirium include agitation, disorientation, delusional thoughts, hallucinations, poor memory, difficulty speaking and trouble understanding speech.

[0225] In some embodiments, the disorder comprises cognitive decline. Exemplary forms of cognitive decline include mild cognitive impairment, dementia, primary progressive aphasia, corticobasal degeneration, primary progressive aphasia, and progressive supranuclear palsy. Exemplary signs and symptoms of cognitive decline include forgetfulness, feelings of being overwhelmed, difficulty understanding directions or instructions, inability to organize tasks, and an increased impulsiveness.

[0226] In some embodiments, the disorder comprises a headache. In some embodiments, the headache comprises a migraine (e.g., with aura or without aura). Headaches may include sinus headaches, tension headache, migraine, and cluster headache. Exemplary signs and symptoms of headaches include pain (e.g., deep and constant) in the cheekbones, forehead, bridge of the nose, the cranium, or the back of the neck, aura, photophobia, phonophobia, and emesis.

[0227] In some embodiments, the disorder comprises chronic pain. In some embodiments, chronic pain comprises fibromyalgia. Exemplary signs and symptoms of fibromyalgia include muscular pain, fatigues, depression, anxiety, sleeplessness, headache, and difficulty concentrating. Exemplary chronic pain disorders include postsurgical pain, post-trauma pain, low back pain, cancer pain, arthritis pain, muscular pain, and neuropathic pain (e.g., diabetic neuropathy).

[0228] In some embodiments, the disorder comprises chronic fatigue syndrome (also referred to as myalgic encephalomyelitis). Exemplary signs and symptoms of chronic fatigue syndrome include extreme fatigue that lasts for extended periods of time (e.g., for at least six months) that cannot be fully explained by an underlying medical condition, fatigue that worsens with physical or mental activity, pain (e.g., joint or muscular), malaise, forgetfulness, anxiety, and depression.

[0229] In some embodiments, the disorder comprises a motor neuron disease. In some embodiments, the motor neuron disease is amyotrophic lateral sclerosis (ALS). Exemplary forms of motor neuron diseases include progressive bulbar palsy (PBP), progressive muscular atrophy (PMA), ALS, and primary lateral sclerosis (PLS). Exemplary signs and symptoms of motor neuron diseases (e.g., ALS) include motor control difficulties (e.g., difficulty walking or completing normal daily activities), muscular weakness, slurred speech, difficulty swallowing, muscle cramps and twitching (e.g., in the arms, shoulders, or tongue), and inappropriate crying, laughing or yawning,

[0230] In some embodiments, the disorder comprises a coagulation or clotting disorder. In some embodiments, the coagulation or clotting disorder comprises Hemophilia, Von Willebrand disease or clotting factor deficiencies. In some embodiments, the coagulation or clotting disorder comprises a thrombophilia. In some embodiments, the thrombophilia comprises an inherited thrombophilia. In some embodiments, the thrombophilia comprises an acquired thrombophilia. In some embodiments, the coagulation or clotting disorder comprises a hypercoagulable state. In some embodiments, the hypercoagulable state comprises cancer. In some embodiments, the hypercoagulable state comprises atrial fibrillation. In some embodiments, the hypercoagulable states comprises a post surgical period or immobility. In some embodiments, the coagulation or clotting disorder comprises arterial thrombosis or thromboembolism. In some embodiments, the coagulation or clotting disorder comprises venous thrombosis or thromboembolism. In some embodiments, the venous thromboembolism comprises deep venous thrombosis. In some embodiments, the venous thromboembolism comprises pulmonary embolism. In some embodiments, the venous thromboembolism comprises thrombophlebitis.

[0231] In some cases, the disorder may be diagnosed with the use of a questionnaire or a scoring system. In some cases, the disorder is diagnosed according to DSM-5 criteria. In some cases, the disorder is diagnosed by a healthcare professional (e.g., physician or the like).

[0232] In some embodiments, the disorder comprises one or more disorders (e.g., any of the disorders disclosed herein). In some embodiments, the disorder comprises two disorders. In some embodiments, the disorder comprises three disorders. In some embodiments, the disorder comprises four disorders. In some embodiments, the disorder comprises five disorders.

### B. Subjects

[0233] Some embodiments of the methods described herein include treatment of a subject. Non-limiting examples of subjects include vertebrates, animals, mammals, dogs, cats, cattle, rodents, mice, rats, primates, monkeys, and humans. In some embodiments, the subject is a vertebrate. In some embodiments, the subject is an animal. In some embodiments, the subject is a mammal. In some embodiments, the subject is a dog. In some embodiments, the subject is a cat. In some embodiments, the subject is a cattle. In some embodiments, the subject is a mouse. In some embodiments, the subject is a rat. In some embodiments, the subject is a primate. In some embodiments, the subject is a monkey. In some embodiments, the subject is an animal, a mammal, a dog, a cat, cattle, a rodent, a mouse, a rat, a primate, or a monkey. In some embodiments, the subject is a human.

[0234] In some embodiments, the subject is male. In some embodiments, the subject is female. In some embodiments, the subject is an adult (e.g. at least 18 years old). In some embodiments, the subject is 45 years old or greater. In some embodiments, the subject is 50 years old or greater. In some embodiments, the subject is 55 years old or greater. In some embodiments, the subject is 60 years old or greater. In some embodiments, the subject is 65 years old or greater. In some embodiments, the subject is 70 years old or greater. In some embodiments, the subject is 75 years old or greater. In some embodiments, the subject is 80 years old or greater. In some embodiments, the subject is 85 years old or greater.

[0235] In some embodiments, the subject has a body mass index (BMI) of 25, 26, 27, 28, 29, 30, 31, 32, 33, 34, 35, 36, 37, 38, 39, 40, 41, 42, 43, 44, 45, 46, 47, 48, 49, 50, or more, or a range defined by any two of the aforementioned integers. In some embodiments, the subject is overweight. In some embodiments, the subject has a BMI of 25 or more. In some embodiments, the subject has a BMI of 25-29. In some embodiments, the subject is obese. In some embodiments, the subject has a BMI of 30 or more. In some embodiments, the subject has a BMI of 30-39. In some embodiments, the subject has a BMI of 40-50. In some embodiments, the subject has a BMI of 25-50.

[0236] In some embodiments, the subject has a personal history with the disorder. In some embodiments, the subject has a familial history with the disorder. In some embodiments, the subject is at high risk of contracting the disorder.

[0237] In some embodiments, the subject has a coagulation or clotting disorder. In some embodiments, the coagulation or clotting disorder comprises Hemophilia, Von Willebrand disease or clotting factor deficiencies. In some embodiments, the subject has a thrombophilia. In some embodiments, the thrombophilia comprises an inherited thrombophilia. In some embodiments, the thrombophilia comprises an acquired thrombophilia. In some embodiments, the subject has a hypercoagulable state. In some embodiments, the hypercoagulable state comprises cancer. In some embodiments, the hypercoagulable state comprises atrial fibrillation. In some embodiments, the hypercoagulable states comprises a post surgical period or immobility. In some embodiments, the subject has arterial thrombosis or thromboembolism. In some embodiments, the subject has venous thrombosis or thromboembolism. In some embodiments, the venous thromboembolism comprises deep venous thrombosis. In some embodiments, the venous thromboembolism comprises pulmonary embolism. In some embodiments, the venous thromboembolism comprises thrombophlebitis.

### C. Baseline Measurements

[0238] Some embodiments of the methods described herein include obtaining a baseline measurement from a subject. In some embodiments, the baseline measurement is a mental disorder (e.g., psychiatric or neurological disorder) baseline measurement. For example, in some embodiments, a baseline measurement is obtained from the subject prior to treating the subject. Non-limiting examples of baseline measurements include a baseline measurement of Montgomery-Asberg Depression Rating Scale (MADRS); a baseline Hamilton Depression Rating Scale-17 (e.g., scale ranges from 0 to 52 with a higher score indicating worsening symptoms of depression); baseline anxiety symptoms and/or signs, baseline eating disorder symptoms and/or signs, baseline substance-use disorder symptoms and/or signs, baseline post-traumatic stress disorder symptoms and/or signs, baseline bipolar disorder symptoms and/or signs, baseline schizophrenia symptoms and/or signs, and baseline psychosis symptoms and/or signs. In some embodiments, the baseline measurement includes an aspect of any of Tables 1A-1C and 2A-2B. The baseline measurement may include a baseline fibrinogen measurement, a baseline FGG mRNA measurement, or a baseline FGG protein measurement. The baseline measurement may include a baseline clotting measurement, a baseline prothrombin time (PT) measurement, a baseline Intemational Normalized Ratio (INR) measurement, or a baseline activated partial thromboplastin time (aPTT) measurement.

[0239] In some embodiments, the baseline measurement is obtained directly from the subject. In some embodiments, the baseline measurement is obtained by observation of the subject. In some embodiments, the baseline measurement is obtained by questioning the subject. In some embodiments, the baseline measurement is obtained by the subject filling out a questionnaire.

[0240] In some embodiments, the baseline measurement is a baseline Montgomery-Asberg Depression Rating Scale (MADRS) score. The MADRS scale may range from 0 to 60 with a higher score indicating worsening symptoms of depression. The MADRS generally includes a ten-item diagnostic questionnaire which psychiatrists use to measure the severity of depressive episodes in patients with mood disorders. It was designed as an adjunct to the HDRS to be, in some cases, more sensitive to changes brought on by antidepressants or other forms of treatment. A higher MADRS score indicates more severe depression than a lower score. The overall score ranges from 0 to 60. Example cutoff points are as follows:
[0241] 0 to 6—normal/absent symptoms
[0242] 7 to 19—mild depression
[0243] 20 to 34—moderate depression, and
[0244] >34—severe depression.

[0245] In some embodiments, the baseline MADRS score comprises a numerical value such as a number of points. In some embodiments, the numerical value is 1, 2, 3, 4, 5, 6, 7, 8, 9, 10, 11, 12, 13, 14, 15, 16, 17, 18, 19, 20, 21, 22, 23, 24, 25, 26, 27, 28, 29, 30, 31, 32, 33, 34, 35, 36, 37, 38, 39, 40 41, 42, 43, 44, 45, 46, 47, 48, 49, 50, 51, 52, 53, 54, 55 56, 57, 58, 59, or 60, or a range defined by any two of the aforementioned numerical values. In some embodiments, the numerical value is 1-5. In some embodiments, the numerical value is 6-10. In some embodiments, the numerical value is 11-15. In some embodiments, the numerical value is 16-20. In some embodiments, the numerical value is 21-25. In some embodiments, the numerical value is 26-30. In some embodiments, the numerical value is 31-35. In some embodiments, the numerical value is 36-40. In some embodiments, the numerical value is 41-45. In some embodiments, the numerical value is 46-50. In some embodiments, the numerical value is 51-55. In some embodiments, the numerical value is 56-60. In some embodiments, the numerical value is 1-60. In some embodiments, the baseline MADRS score comprises a baseline subscore such as a baseline apparent sadness score, a baseline reported sadness score, a baseline inner tension score, a baseline reduced sleep score, a baseline reduced appetite score, a baseline concentration difficulties score, a baseline lassitude score, a baseline inability to feel score, a baseline pessimistic thoughts score, or a baseline suicidal thoughts score. Each baseline subscore may comprise a numerical value of 0, 1, 2, 3, 4, 5, or 6, or a range of such numerical values. In some embodiments, the baseline MADRS score comprises a numerical value at or above a threshold numerical value that is indicative of a depressive disorder. For example, the subject may be depressed prior to treatment and have a baseline MADRS score of 7-60. The subject may have mild depression prior to treatment and have a baseline MADRS score of 7-19. The subject may have moderate depression prior to treatment and have a baseline MADRS score of 20-34. The subject may have severe depression prior to treatment and have a baseline MADRS score over 34. In some embodiments, one or more of the baseline subscores comprise a numerical value at or above a threshold numerical value that is indicative of the depressive disorder.

[0246] In some embodiments, the baseline measurement comprises a baseline Hamilton Depression Rating Scale (HDRS) score. The HRSD typically includes a multiple item questionnaire used to provide an indication of depression, and as a guide to evaluate recovery. The questionnaire is usually designed for adults and is used to rate the severity of their depression by probing mood, feelings of guilt, suicide ideation, insomnia, agitation or retardation, anxiety, weight loss, and somatic symptoms. The subject is usually rated by a clinician on 17 to 29 items (depending on version) scored either on a 3-point or 5-point Likert-type scale. In some cases, the HDRS includes 17 items (HDRS₁₇). Other variations may be used, such as those that include more than 17 items. For example, up to 29 items may be used in some cases (HDRS₂₉). For the 17-item version, a score of 0-7 is typically considered to be normal while a score of 20 or higher may indicate moderate or severe depression.

[0247] In some embodiments, the baseline HDRS score comprises a numerical value such as a number of points. In some embodiments, the numerical value is 1, 2, 3, 4, 5, 6, 7, 8, 9, 10, 11, 12, 13, 14, 15, 16, 17, 18, 19, 20, 21, 22, 23, 24, 25, 26, 27, 28, 29, 30, 31, 32, 33, 34, 35, 36, 37, 38, 39, 40 41, 42, 43, 44, 45, 46, 47, 48, 49, or 50, or a range defined by any two of the aforementioned numerical values. In some embodiments, the numerical value is 1-5. In some embodiments, the numerical value is 6-10. In some embodiments, the numerical value is 11-15. In some embodiments, the numerical value is 16-20. In some embodiments, the numerical value is 21-25. In some embodiments, the numerical value is 26-30. In some embodiments, the numerical value is 31-35. In some embodiments, the numerical value is 36-40. In some embodiments, the numerical value is 41-45. In some embodiments, the numerical value is 46-50. In some embodiments, the numerical value is 51 or 52. In some embodiments, the numerical value is 1-50. In some embodiments, the numerical value is 1-52. In some embodiments, the baseline HDRS score comprises a baseline subscore such as a baseline depressed mood score, a baseline feelings of guilt score, a baseline suicide score, a baseline insomnia early in the night score, a baseline insomnia in the middle of the night score, a baseline insomnia in early hours of the morning score, a baseline work and activities score, a baseline retardation score, a baseline agitation score, a baseline anxiety psychic score, a baseline anxiety somatic score, a baseline somatic symptoms of gastrointestinal score, a baseline general somatic score, a baseline genital symptoms score, a baseline hypochondriasis score, a baseline loss of weight score, or a baseline insight score. Baseline subscores may comprise a numerical value of 0, 1, or 2, or a range of such numerical values. Baseline subscores may comprise a numerical value of 0, 1, 2, 3, or 4, or a range of such numerical values. In some embodiments, the baseline HDRS score comprises a numerical value at or above a threshold numerical value that is indicative of a depressive disorder. For example, a HDRS score of 20 or higher may be indicative of moderate to severe depression. In some cases, the subject is depressed prior to treatment and has an HDRS score above 19. In some cases, the subject is at least mildly depressed prior to treatment and has an HDRS score above 7. In some embodiments, the baseline subscore comprises a numerical value at or above a threshold numerical value that is indicative of the depressive disorder.

[0248] In some embodiments, the baseline measurement is a baseline anxiety measurement. The baseline anxiety measurement may include a baseline assessment of a sign or symptom of anxiety (e.g., a baseline anxiety sign or symptom). Examples of signs or symptoms of anxiety include stress (e.g. stress that's out of proportion to the impact of an event), worry (for example, inability to set aside a worry), or restlessness. In some cases, the symptom of anxiety includes one or more behavioral symptoms such as hypervigilance, irritability, or restlessness. In some cases, the symptom of anxiety includes one or more cognitive symptoms such as lack of concentration, racing thoughts, or unwanted thoughts. In some cases, the symptom of anxiety includes one or more whole body symptoms such as fatigue or sweating. In some cases, the symptoms of anxiety include any of excessive worry, fear, feeling of impending doom, insomnia, nausea, palpitations, or trembling. In some embodiments, the symptom includes one or more panic attacks. The baseline assessment may include an amount, frequency, duration, or intensity of the anxiety or symptoms of anxiety. The baseline assessment may include an amount of time since experiencing the anxiety or symptoms. The baseline assessment may include a frequency of experiencing the anxiety or symptoms.

[0249] In some embodiments, the baseline measurement is a baseline eating disorder measurement. In some embodiments, the baseline measurement is a baseline eating disorder sign or symptom. Examples of eating disorders include anorexia, bulimia, binge eating disorder, pica, rumination, or avoidant eating disorder. In some embodiments, the eating disorder includes anorexia nervosa. In some embodiments, the eating disorder includes bulimia. In some embodiments, the eating disorder includes binge eating. In some embodiments, the eating disorder includes pica. The baseline eating disorder measurement may include a baseline assessment of a sign or symptom of eating disorder (e.g., a baseline eating disorder sign or symptom). Some examples of symptoms of an eating disorder comprising anorexia nervosa include being considerably underweight compared with people of similar age and height, very restricted eating patterns, an intense fear of gaining weight or persistent behaviors to avoid gaining weight despite being underweight, a relentless pursuit of thinness and unwillingness to maintain a healthy weight, a heavy influence of body weight or perceived body shape on self-esteem, a distorted body image, or denial of being seriously underweight. The baseline assessment may include an amount, frequency, duration, or intensity of the engaging in the eating disorder or experiencing symptoms of the eating disorder. The baseline assessment may include an amount of time since engaging in the eating disorder or experiencing symptoms of the eating disorder. The baseline assessment may include a frequency of engaging in the eating disorder or experiencing symptoms of the eating disorder.

[0250] In some embodiments, the baseline measurement is a baseline substance-use measurement. In some embodiments, the baseline substance-use measurement includes a baseline determination of a level of addiction to an addictive substance. Examples of addictive substances include alcohol, antianxiety drugs, sedative drugs, caffeine, cannabis (e.g. including marijuana or synthetic cannabinoids), hallucinogens (e.g. LSD, phencyclidine, or psilocybin), inhalants (e.g. paint thinner or some glues), opioids (e.g. fentanyl, morphine, or oxycodone), stimulants (e.g. amphetamines or cocaine), tobacco, or anabolic steroids. The baseline determination of a level of addiction to an addictive substance may include a questionnaire or assessment. The baseline determination of a level of addiction to an addictive substance may include an amount of time since ingesting the addictive substance. The baseline determination of a level of addiction to an addictive substance may include a frequency of ingesting the addictive substance. The baseline assessment may include an amount, frequency, duration, or intensity of the engaging in the substance-use disorder or experiencing symptoms of the substance-use disorder. The baseline assessment may include an amount of time since engaging in the substance-use disorder or experiencing symptoms of the substance-use disorder. The baseline assessment may include a frequency of engaging in the substance-use disorder or experiencing symptoms of the substance-use disorder. The baseline assessment may include signs or symptoms of the substance-use disorder. Exemplary signs and symptoms may include feelings of regularly (e.g., daily) substance-use, intense urges for the substance, needing more of the substance to obtain a previously obtained effect, and continuing to use the substance although use of the substance is known to cause problems in normal life activities.

[0251] In some embodiments, the baseline measurement comprises a baseline post-traumatic stress disorder (PTSD) measurement. In some embodiments, the baseline PTSD measurement includes a baseline determination of the level of severity of PTSD. The baseline assessment of a sign or symptom of PTSD may include the number of signs or symptoms of PTSD. The baseline determination of the level of severity of PTSD may include the time since last experiencing a PTSD flashback (e.g., reliving the traumatic event as if it were happening again), nightmare, or severe anxiety. The baseline assessment may include a frequency in PTSD related flashbacks, nightmares, or severe anxiety episodes. The baseline assessment may include a severity of a sign or symptom of PTSD. The baseline assessment may include a frequency of a sign or symptom of PTSD. Exemplary signs and symptoms of PTSD may include intrusive memories (e.g., recurrent, unwanted distressing memories of atraumatic event, severe emotional distress or physical reactions to something that reminiscent of the traumatic event, attempts to avoid thinking or talking about the traumatic event, avoiding places, activities or people reminiscent of the traumatic event, thoughts of hopelessness, memory problems, difficulty maintaining close relationships, and feeling a lack of interest in activities that were once enjoyed.

[0252] In some embodiments, the baseline measurement comprises a baseline bipolar disorder measurement. In some embodiments, the baseline bipolar disorder measurement is a sign or symptom of bipolar disorder. The baseline assessment of a sign or symptom of bipolar disorder may include a frequency of a sign or symptom of bipolar disorder. The baseline assessment of a sign or symptom of bipolar disorder may include a severity of a sign or symptom of bipolar disorder. The baseline assessment of a sign or symptom of bipolar disorder may include the number of signs or symptoms of bipolar disorder. Exemplary signs and symptoms of bipolar disorder include any of the bipolar signs and symptoms disclosed herein, including, manic episodes (e.g., experiencing feelings of increased activity, energy, or agitation, an exaggerated sense of well-being and self-confidence, a decreased need for sleep, racing thoughts, distractibility, and a decreased ability to control impulses), and major depressive episodes (e.g., experiencing a depressed mood, marked loss of interest of feelings of pleasure, fatigue or loss of energy, feelings of guilt or worthlessness, and a decreased ability to think or concentrate).

[0253] In some embodiments, the baseline measurement comprises a baseline schizophrenia measurement. In some embodiments, the baseline schizophrenia measurement is a sign or symptom of schizophrenia. The baseline assessment of a sign or symptom of schizophrenia may include a frequency of a sign or symptom of schizophrenia. The baseline assessment of a sign or symptom of schizophrenia may include a severity of a sign or symptom of schizophrenia. The baseline assessment of a sign or symptom of schizophrenia may include the number of signs or symptoms of schizophrenia. Exemplary signs and symptoms of schizophrenia may include delusions, hallucinations, disorganized thoughts and speech, disorganized or abnormal motor behavior, and negative symptoms (e.g., social withdrawal, anhedonia, avolition, decreased sense of purpose, lack of interest in activities, flat affect, lack of eye contact, and physical inactivity.

[0254] In some embodiments, the baseline measurement comprises a baseline psychosis measurement. In some embodiments, the baseline psychosis measurement is a baseline sign or symptom of psychosis (e.g., baseline psychosis sign or symptom). The baseline assessment of a sign or symptom of psychosis may include a frequency of a sign or symptom of psychosis. The baseline assessment of a sign or symptom of psychosis may include a severity of a sign or symptom of psychosis. The baseline assessment of a sign or symptom of psychosis may include the number of signs or symptoms of psychosis. Exemplary signs and symptoms of psychosis may include difficulty concentrating, depressed mood, anxiety, excessive suspiciousness, delusions, and hallucinations.

[0255] In some embodiments, the baseline measurement comprises a baseline measurement of a neurological disorder. Non-limiting examples of baseline measurements of neurological disorders include a baseline measurement of cognitive function, a baseline measurement of CNS amyloid plaque(s) (e.g., accumulation), a baseline measurement of CNS tau accumulation, a baseline measurement of CSF beta-amyloid 42 (e.g., accumulation), a baseline measurement of CSF tau (e.g., accumulation), a baseline measurement of CSF phospho-tau (e.g., accumulation), a baseline measurement of Lewy bodies (e.g., accumulation), or a baseline measurement of CSF alpha-synuclein (e.g., accumulation). Further non-limiting examples of baseline measurements include a baseline measurement of headache signs and/or symptoms, a baseline measurement of migraine symptoms and/or signs, a baseline measurement of chronic pain symptoms and/or signs, a baseline measurement of fibromyalgia symptoms and/or signs, a baseline measurement of chronic fatigue syndrome (ME) symptoms and/or signs, and a baseline measurement of motor neuron disease (e.g., ALS) symptoms and/or signs.

[0256] In some embodiments, the baseline measurement comprises a baseline CNS amyloid plaque accumulation measurement. Exemplary CNS amyloid plaque accumulation measurements may include a total amount of amyloid plaque in the CNS (e.g., the brain) and the concentration of amyloid plaque in an area of the CNS (e.g., the brain). CNS amyloid plaque accumulation may be measured in any appropriate manner, including, but not limited to a measurement of CNS amyloid plaque through the use of immunoprecipitation mass spectrometry, blood tests, cerebrospinal fluid tests, and a measurement of CNS amyloid plaque through the use of imaging (e.g., amyloid PET scan(s)).

[0257] In some embodiments, the baseline measurement comprises a baseline tau (e.g., CNS or CSF) accumulation. Exemplary tau (e.g., CNS or CSF) accumulation measurements may include a total amount of tau accumulation in the CNS (e.g., the brain or CSF), and the concentration of tau in an area of the CNS (e.g., the brain or CSF). Tau (e.g., CNS or CSF) accumulation may be measured in any appropriate manner, including, but not limited to imaging (e.g., tau PET scans), blood tests, and cerebrospinal fluid tests.

[0258] In some embodiments, the baseline measurement comprises a baseline CSF beta-amyloid 42 accumulation. Exemplary CSF beta-amyloid 42 accumulation measurements may include a total amount of beta-amyloid 42 accumulation in the CNS (e.g., the CSF), and the concentration of beta-amyloid 4 in an area of the CNS (e.g., CSF). CSF beta-amyloid 4 accumulation may be measured in any appropriate manner, including, but not limited to imaging (e.g., PET scans), blood tests, and cerebrospinal fluid tests.

[0259] In some embodiments, the baseline measurement comprises a baseline CSF beta-amyloid 42 accumulation. Exemplary CSF beta-amyloid 42 accumulation measurements may include a total amount of beta-amyloid 42 accumulation in the CNS (e.g., the CSF), and the concentration of beta-amyloid 4 in an area of the CNS (e.g., CSF). CSF beta-amyloid 4 accumulation may be measured in any appropriate manner, including, but not limited to imaging (e.g., PET scans), blood tests, and cerebrospinal fluid tests.

[0260] In some embodiments, the baseline measurement comprises a baseline (e.g., CSF) phospho-tau accumulation. Exemplary (e.g., CSF) phospho-tau (e.g., 181) accumulation measurements may include a total amount of phospho-tau accumulation in the CNS (e.g., the CSF or the brain), and the concentration of (e.g., CSF) phospho-tau in an area of the CNS (e.g., CSF or the brain). Phospho-tau (e.g., CSF phosphor-tau) accumulation may be measured in any appropriate manner, including, but not limited to imaging (e.g., PET scans), blood tests, and cerebrospinal fluid tests.

[0261] In some embodiments, the baseline measurement comprises a baseline Lewy body accumulation. Exemplary Lewy body accumulation measurements may include a total amount of Lewy body accumulation in the CNS (e.g., the brain), and the concentration of Lewy body in an area of the CNS (e.g., brain). Lewy body accumulation may be measured in any appropriate manner, including, but not limited to imaging (e.g., PET scan, MRI, CT scan, fluorodeoxyglucose PET scan, or single-photon emission computerized tomography (SPECT)), blood tests, and cerebrospinal fluid tests.

[0262] In some embodiments, the baseline measurement comprises a baseline (e.g., CSF) alpha-synuclein accumulation. Exemplary (e.g., CSF) alpha-synuclein accumulation measurements may include a total amount of alpha-synuclein accumulation in the CNS (e.g., the CSF or the brain), and the concentration of (e.g., CSF) alpha-synuclein in an area of the CNS (e.g., CSF or the brain). Alpha-synuclein (e.g., CSF alpha-synuclein) accumulation may be measured in any appropriate manner, including, but not limited to imaging (e.g., PET scans), blood tests, cerebrospinal fluid tests, and biopsy tests (e.g., Syn-One test).

[0263] In some embodiments, the baseline measurement is a baseline cognitive function measurement. The baseline cognitive function measurement may be obtained directly from the subject. For example, the subject may be administered a test. The test may include a cognitive test such as the Montreal Cognitive Assessment (MoCA), Mini-Mental State Exam (MMSE), or Mini-Cog. The test may include assessment of basic cognitive functions such as memory, language, executive frontal lobe function, apraxia, visuospatial ability, behavior, mood, orientation, or attention. The baseline cognitive function measurement may include a score. The baseline cognitive function measurement may be indicative of mild cognitive impairment, or of severe cognitive impairment. The baseline cognitive function measurement may be indicative of a neurological disorder.

[0264] In some embodiments, the baseline measurement is a baseline amyloid plaque measurement. The baseline amyloid plaque measurement may include a central nervous system (CNS) amyloid plaque measurement. In some embodiments, the baseline amyloid plaque measurement includes a baseline concentration or amount. The baseline amyloid plaque measurement may be performed using an imaging device. The imaging device may include a positron emission tomography (PET) device. The baseline amyloid plaque measurement may be performed on a biopsy. The baseline amyloid plaque measurement may be performed using a spinal tap (for example, when the baseline amyloid plaque measurement includes a baseline cerebrospinal fluid (CSF) amyloid plaque measurement). In some embodiments, the baseline amyloid plaque measurement is obtained by an assay such as an immunoassay. The baseline beta amyloid plaque measurement may be indicative of a neurodegenerative disease such as Alzheimer's disease.

[0265] In some embodiments, the baseline measurement is a baseline beta-amyloid 42 measurement. The baseline beta-amyloid 42 measurement may include a cerebrospinal fluid (CSF) beta-amyloid 42 measurement. In some embodiments, the baseline beta-amyloid 42 measurement includes a baseline concentration or amount. The baseline beta-amyloid 42 measurement may be performed on a biopsy. The baseline beta-amyloid 42 measurement may be performed using a spinal tap (for example, when the baseline beta-amyloid 42 measurement includes a baseline CSF beta-amyloid 42 measurement). In some embodiments, the baseline beta-amyloid 42 measurement is obtained by an assay such as an immunoassay. The baseline beta-amyloid 42 measurement may be indicative of a neurodegenerative disease such as Alzheimer's disease.

[0266] In some embodiments, the baseline measurement is a baseline tau measurement. In some embodiments, the baseline tau measurement includes a baseline concentration or amount. The baseline tau measurement may be performed on a biopsy. In some embodiments, the baseline tau measurement is obtained by an assay such as an immunoassay. The baseline beta tau measurement may be indicative of a neurodegenerative disease such as Alzheimer's disease or Parkinson's disease.

[0267] In some embodiments, the baseline tau measurement is a baseline central nervous system (CNS) tau measurement. The baseline tau measurement may include a baseline total tau measurement. The baseline tau measurement may include a baseline unphosphorylated tau measurement. The baseline tau measurement may include a baseline phosphorylated tau (phospho-tau) measurement. In some embodiments, the baseline tau measurement is a baseline tau accumulation measurement. In some embodiments, the baseline tau measurement is a baseline CNS tau accumulation measurement. The baseline CNS tau accumulation measurement may be indicative of a neurodegenerative disease such as Alzheimer's disease or Parkinson's disease.

[0268] The baseline tau measurement may include a cerebrospinal fluid (CSF) tau measurement. The baseline CSF tau measurement may be performed after use of a spinal tap. The baseline CSF tau measurement may be indicative of a neurodegenerative disease such as Alzheimer's disease or Parkinson's disease.

[0269] The baseline CSF tau measurement may include a baseline CSF phospho-tau measurement. The baseline CSF phospho-tau measurement may include an amount of phospho-tau in relation to total tau or unphosphorylated tau. For example, the baseline CSF phospho-tau measurement may include a phospho-tau/tau ratio. The baseline CSF phospho-tau measurement may be indicative of a neurodegenerative disease such as Alzheimer's disease or Parkinson's disease.

[0270] In some embodiments, the baseline measurement is a baseline Lewy body measurement. The baseline Lewy body measurement may include a central nervous system (CNS) Lewy body measurement. In some embodiments, the baseline Lewy body measurement includes a baseline concentration or amount. The baseline Lewy body measurement may be performed using an imaging device. The imaging device may include a positron emission tomography (PET) device. The baseline beta Lewy body measurement may be indicative of dementia.

[0271] In some embodiments, the baseline measurement is a baseline alpha-synuclein measurement. The baseline alpha-synuclein measurement may include a cerebrospinal fluid (CSF) alpha-synuclein measurement. In some embodiments, the baseline alpha-synuclein measurement includes a baseline concentration or amount. The baseline alpha-synuclein measurement may be performed on a biopsy. The baseline alpha-synuclein measurement may be performed using a spinal tap (for example, when the baseline alpha-synuclein measurement includes a baseline CSF alpha-synuclein measurement). In some embodiments, the baseline alpha-synuclein measurement is obtained by an assay such as an immunoassay. The baseline alpha-synuclein measurement may be indicative of a neurodegenerative disease such as Parkinson's disease. The baseline alpha-synuclein measurement may be indicative of dementia.

[0272] In some embodiments, the baseline measurement is a baseline headache measurement. some embodiments, the baseline headache measurement is a baseline headache sign or symptom measurement. In some embodiments, the baseline headache measurement is a baseline migraine (e.g., with aura or without aura) measurement. In some embodiments, the baseline headache measurement is a frequency of a headache sign or symptom measurement. In some embodiments, the baseline headache measurement is a severity of a headache sign or symptom measurement. In some embodiments, the baseline headache measurement is a number of headache signs or symptoms. Exemplary signs and symptoms of headaches include pain (e.g., deep and constant) in the cheekbones, forehead, bridge of the nose, the cranium, or the back of the neck, aura, photophobia, phonophobia, and emesis.

[0273] In some embodiments, the baseline measurement is a baseline chronic pain measurement. In some embodiments, baseline chronic pain measurement is a baseline fibromyalgia measurement. In some embodiments, the baseline chronic pain measurement is a baseline chronic pain sign or symptom measurement. In some embodiments, the baseline chronic pain measurement is a frequency of a chronic pain sign or symptom measurement. In some embodiments, the baseline chronic pain measurement is a severity of a chronic pain sign or symptom measurement. In some embodiments, the baseline chronic pain measurement is a number of chronic pain signs or symptoms. Exemplary signs and symptoms of fibromyalgia include muscular pain, fatigues, depression, anxiety, sleeplessness, headache, and difficulty concentrating. Exemplary chronic pain disorders include postsurgical pain, post-trauma pain, low back pain, cancer pain, arthritis pain, muscular pain, and neuropathic pain (e.g., diabetic neuropathy).

[0274] In some embodiments, the baseline measurement is a baseline chronic fatigue syndrome (also referred to as myalgic encephalomyelitis) measurement. In some embodiments, the baseline chronic fatigue syndrome measurement is a baseline chronic fatigue syndrome sign or symptom measurement. In some embodiments, the baseline chronic fatigue syndrome measurement is a frequency of a headache sign or symptom measurement. In some embodiments, the baseline chronic fatigue syndrome measurement is a severity of a chronic fatigue syndrome sign or symptom measurement. In some embodiments, the baseline chronic fatigue syndrome n measurement is a number of chronic fatigue syndrome signs or symptoms. Exemplary signs and symptoms of chronic fatigue syndrome include extreme fatigue that lasts for extended periods of time (e.g., for at least six months) that cannot be fully explained by an underlying medical condition, fatigue that worsens with physical or mental activity, pain (e.g., joint or muscular), malaise, forgetfulness, anxiety, and depression.

[0275] In some embodiments, the baseline measurement is a baseline motor neuron disease measurement. In some embodiments, the baseline motor neuron disease measurement is an amyotrophic lateral sclerosis (ALS) measurement. In some embodiments, the baseline motor neuron disease measurement is a baseline motor neuron disease sign or symptom measurement. In some embodiments, the baseline motor neuron disease measurement is a frequency of a motor neuron disease sign or symptom measurement. In some embodiments, the baseline motor neuron disease measurement is a severity of a motor neuron disease sign or symptom measurement. In some embodiments, the baseline motor neuron disease measurement is a number of motor neuron disease signs or symptoms. Exemplary forms of motor neuron diseases include progressive bulbar palsy (PBP), progressive muscular atrophy (PMA), ALS, and primary lateral sclerosis (PLS). Exemplary signs and symptoms of motor neuron diseases include motor control difficulties (e.g., difficulty walking or completing normal daily activities), muscular weakness, slurred speech, difficulty swallowing, and muscle cramps and twitching (e.g., in the arms, shoulders, or tongue).

[0276] In some embodiments, the baseline measurement is a baseline level of fibrinogen. In some embodiments, the baseline measurement is a baseline level of circulating fibrinogen.

[0277] In some embodiments, the baseline measurement is a baseline clotting or coagulation measurement. In some embodiments, the baseline measurement is a baseline clotting time measurement. In some embodiments, the baseline measurement is a baseline prothrombin time (PT). In some embodiments, the baseline measurement is a baseline International Normalized Ratio (INR). In some embodiments, the baseline measurement is a baseline activated partial thromboplastin time (aPTT).

[0278] In some cases, the disorder (e.g., baseline measurement) may be diagnosed or measured with the use of a questionnaire or a scoring system. In some cases, the disorder is diagnosed according to DSM-5 criteria. In some cases, the disorder is diagnosed by a healthcare professional (e.g., physician or the like).

[0279] Baseline measurements may include a baseline FGG protein measurement, or a baseline FGG mRNA measurement.

[0280] Baseline measurements may include any one or more of the baseline measurements disclosed herein.

[0281] In some embodiments, the baseline measurement is obtained directly from the subject. In some embodiments, the baseline measurement is obtained by observation, for example by observation of the subject or of the subject's tissue. In some embodiments, the baseline measurement is obtained noninvasively using an imaging device. In some embodiments, the baseline measurement is obtained invasively using an imaging device.

[0282] In some embodiments, the baseline measurement is obtained in a sample from the subject. In some embodiments, the baseline measurement is obtained in one or more histological tissue sections. In some embodiments, the baseline measurement is obtained by performing an assay such as an immunoassay, a colorimetric assay, or a fluorescence assay, on the sample obtained from the subject. In some embodiments, the baseline measurement is obtained by an immunoassay, a colorimetric assay, a fluorescence assay, or a chromatography (e.g. HPLC) assay. In some embodiments, the baseline measurement is obtained by PCR.

[0283] In some embodiments, the baseline measurement is a baseline FGG protein measurement. In some embodiments, the baseline FGG protein measurement comprises a baseline FGG protein level. In some embodiments, the baseline FGG protein level is indicated as a mass or percentage of FGG protein per sample weight. In some embodiments, the baseline FGG protein level is indicated as a mass or percentage of FGG protein per sample volume. In some embodiments, the baseline FGG protein level is indicated as a mass or percentage of FGG protein per total protein within the sample. In some embodiments, the baseline FGG protein measurement is a baseline tissue FGG protein measurement. In some embodiments, the baseline FGG protein measurement is obtained by an assay such as an immunoassay, a colorimetric assay, or a fluorescence assay. In some embodiments, the baseline FGG protein level is measured in the whole body. In some embodiments, the baseline FGG protein level is measured in the brain. In some embodiments, the baseline FGG protein level is measured in the liver. In some embodiments, the baseline FGG protein level is measured in the blood.

[0284] In some embodiments, the baseline measurement is a baseline FGG mRNA measurement. In some embodiments, the baseline FGG mRNA measurement comprises a baseline FGG mRNA level. In some embodiments, the baseline FGG mRNA level is measured in the liver. In some embodiments, the baseline FGG mRNA level is indicated as an amount or percentage of FGG mRNA per sample weight. In some embodiments, the baseline FGG mRNA level is indicated as an amount or percentage of FGG mRNA per sample volume. In some embodiments, the baseline FGG mRNA level is indicated as an amount or percentage of FGG mRNA per total mRNA within the sample. In some embodiments, the baseline FGG mRNA level is indicated as an amount or percentage of FGG mRNA per total nucleic acids within the sample. In some embodiments, the baseline FGG mRNA level is indicated relative to another mRNA level, such as an mRNA level of a housekeeping gene, within the sample. In some embodiments, the baseline FGG mRNA measurement is a baseline tissue FGG mRNA measurement. In some embodiments, the baseline FGG mRNA measurement is obtained by an assay such as a polymerase chain reaction (PCR) assay. In some embodiments, the PCR comprises quantitative PCR (qPCR). In some embodiments, the PCR comprises reverse transcription of the FGG mRNA.

[0285] Some embodiments of the methods described herein include obtaining a sample from a subject. In some embodiments, the baseline measurement is obtained in a sample obtained from the subject. In some embodiments, the sample is obtained from the subject prior to administration or treatment of the subject with a composition described herein. In some embodiments, a baseline measurement is obtained in a sample obtained from the subject prior to administering the composition to the subject. In some embodiments, the sample is obtained from the subject in a fasted state. In some embodiments, the sample is obtained from the subject after an overnight fasting period. In some embodiments, the sample is obtained from the subject in a fed state.

[0286] In some embodiments, the sample comprises a fluid. In some embodiments, the sample is a fluid sample. In some embodiments, the sample is a blood, plasma, or serum sample. In some embodiments, the sample comprises blood. In some embodiments, the sample is a blood sample. In some embodiments, the sample is a whole-blood sample. In some embodiments, the blood is fractionated or centrifuged. In some embodiments, the sample comprises plasma. In some embodiments, the sample is a plasma sample. A blood sample may be a plasma sample. In some embodiments, the sample comprises serum. In some embodiments, the sample is a serum sample. A blood sample may be a serum sample. In some embodiments, the sample is a CSF sample. In some embodiments the sample includes a CSF sample. In some embodiments, the sample is a CNS sample. In some embodiments the sample includes a CNS sample.

[0287] In some embodiments, the sample comprises a tissue. In some embodiments, the sample is a tissue sample. In some embodiments, the tissue comprises liver or brain tissue. For example, the baseline FGG mRNA measurement, or the baseline FGG protein measurement, may be obtained in a brain or liver sample obtained from the patient. In some embodiments, the tissue comprises neural tissue. In some embodiments, the tissue comprises neuronal tissue. In some embodiments, the tissue comprises neurons. In some embodiments, the tissue comprises glial cells. In some embodiments, the tissue comprises epithelial cells. In some embodiments, the tissue comprises liver tissue. The liver may include hepatocytes. In some embodiments, the tissue comprises brain tissue. In some embodiments, the sample comprises CSF fluid.

[0288] In some embodiments, the sample includes cells. In some embodiments, the sample comprises a cell. In some embodiments, the cell comprises a liver cell (e.g., hepatocyte), or a brain cell. In some embodiments, the cell is a liver cell. In some embodiments, the liver cell is a hepatocyte. In some embodiments, the cell is a brain cell. In some embodiments, the cell is a neuron. In some embodiments, the cell is a glial cell. In some embodiments, the cell is an epithelial cell. In some embodiments, the cell is a vasculature cell.

### D. Effects

[0289] In some embodiments, the composition or administration of the composition affects a measurement such as mental disorder (e.g., psychiatric disorder or neurological disorder) measurement. In some embodiments, the composition or administration of the composition affects a measurement such as psychiatric measurement (e.g., a Montgomery-Asberg Depression Rating Scale (MADRS) score, a Hamilton Depression Rating Scale (HDRS) score, anxiety signs or symptoms, eating disorder signs or symptoms, substance-use disorder signs or symptoms, post-traumatic stress disorder (PTSD) signs or symptoms, bipolar disorder signs or symptoms, schizophrenia signs or symptoms, or psychosis signs or symptoms). In some embodiments, the composition or administration of the composition affects a measurement, such as psychiatric measurement, relative to the baseline measurement. In some embodiments, administration of the composition affects a measurement of an aspect in any of Tables 1A-1C and 2A-2B. The measurement may include a fibrinogen measurement, a FGG mRNA measurement, or a FGG protein measurement. The measurement may include a clotting measurement, a prothrombin time (PT) measurement, an International Normalized Ratio (INR) measurement, or a activated partial thromboplastin time (aPTT) measurement.

[0290] In some embodiments, the composition or administration of the composition affects a measurement such as neurological measurement (e.g., decreased cognitive function, CNS amyloid plaques (e.g., accumulation), CNS tau accumulation, CSF beta-amyloid 42 (e.g., accumulation), CSF tau (e.g., accumulation), CSF phospho-tau (e.g., accumulation), Lewy bodies (e.g., accumulation), CSF alpha-synuclein (e.g., accumulation), headache signs or symptoms, migraine signs or symptoms, chronic pain signs or symptoms, fibromyalgia signs or symptoms, chronic fatigue (ME) signs or symptoms, motor neuron disease signs or symptoms, or ALS signs or symptoms). In some embodiments, the composition or administration of the composition affects a measurement, such as neurological measurement, relative to the baseline measurement.

[0291] In some embodiments, the measurement indicates that the disorder has been treated. In some embodiments, the measurement indicates that the severity of the disorder has decreased. In some embodiments, the measurement indicates that the severity of a sign or symptom of the disorder has decreased. In some embodiments, the measurement indicates that the frequency of a sign or symptom of the disorder has decreased.

[0292] Some embodiments of the methods described herein include obtaining the measurement from a subject. For example, the measurement may be obtained from the subject after treating the subject. In some embodiments, the measurement is obtained in a second sample (such as a fluid or tissue sample described herein) obtained from the subject after the composition is administered to the subject. In some embodiments, the measurement is an indication that the disorder has been treated.

[0293] In some embodiments, the measurement is obtained directly from the subject. In some embodiments, the measurement is obtained noninvasively using an imaging device. In some embodiments, the measurement is obtained in a second sample from the subject. In some embodiments, the measurement is obtained in one or more histological tissue sections. In some embodiments, the measurement is obtained by performing an assay on the second sample obtained from the subject. In some embodiments, the measurement is obtained by an assay, such as an assay described herein. In some embodiments, the assay is an immunoassay, a colorimetric assay, a fluorescence assay, a chromatography (e.g. HPLC) assay, or a PCR assay. In some embodiments, the measurement is obtained by an assay such as an immunoassay, a colorimetric assay, a fluorescence assay, or a chromatography (e.g. HPLC) assay. In some embodiments, the measurement is obtained by PCR. In some embodiments, the measurement is obtained by histology. In some embodiments, the measurement is obtained by observation. In some embodiments, additional measurements are made, such as in a 3rd sample, a 4th sample, or a fifth sample.

[0294] In some embodiments, the measurement is obtained within 1 hour, within 2 hours, within 3 hours, within 4 hours, within 5 hours, within 6 hours, within 12 hours, within 18 hours, or within 24 hours after the administration of the composition. In some embodiments, the measurement is obtained within 1 day, within 2 days, within 3 days, within 4 days, within 5 days, within 6 days, or within 7 days after the administration of the composition. In some embodiments, the measurement is obtained within 1 week, within 2 weeks, within 3 weeks, within 1 month, within 2 months, within 3 months, within 6 months, within 1 year, within 2 years, within 3 years, within 4 years, or within 5 years after the administration of the composition. In some embodiments, the measurement is obtained after 1 hour, after 2 hours, after 3 hours, after 4 hours, after 5 hours, after 6 hours, after 12 hours, after 18 hours, or after 24 hours after the administration of the composition. In some embodiments, the measurement is obtained after 1 day, after 2 days, after 3 days, after 4 days, after 5 days, after 6 days, or after 7 days after the administration of the composition. In some embodiments, the measurement is obtained after 1 week, after 2 weeks, after 3 weeks, after 1 month, after 2 months, after 3 months, after 6 months, after 1 year, after 2 years, after 3 years, after 4 years, or after 5 years, following the administration of the composition.

[0295] In some embodiments, the composition reduces the measurement relative to the baseline measurement. For example, an adverse phenotype of a psychiatric or neurological disorder may be reduced upon administration of the composition. In some embodiments, the reduction is measured in a second sample obtained from the subject after administering the composition to the subject. In some embodiments, the reduction is measured directly in the subject after administering the composition to the subject. In some embodiments, the measurement is decreased by about 2.5% or more, about 5% or more, or about 7.5% or more, relative to the baseline measurement. In some embodiments, the measurement is decreased by about 10% or more, relative to the baseline measurement. In some embodiments, the measurement is decreased by about 20% or more, about 30% or more, about 40% or more, about 50% or more, about 60% or more, about 70% or more, about 80% or more, about 90% or more, relative to the baseline measurement. In some embodiments, the measurement is decreased by no more than about 2.5%, no more than about 5%, or no more than about 7.5%, relative to the baseline measurement. In some embodiments, the measurement is decreased by no more than about 10%, relative to the baseline measurement. In some embodiments, the measurement is decreased by no more than about 20%, no more than about 30%, no more than about 40%, no more than about 50%, no more than about 60%, no more than about 70%, no more than about 80%, no more than about 90%, or no more than about 100% relative to the baseline measurement. In some embodiments, the measurement is decreased by 2.5%, 5%, 7.5%, 10%, 20%, 30%, 40%, 50%, 60%, 70%, 80%, 90%, or 100%, or by a range defined by any of the two aforementioned percentages.

[0296] In some embodiments, the composition increases the measurement relative to the baseline measurement. For example, a protective psychiatric or neurological phenotype may be increased upon administration of the composition. In some embodiments, the increase is measured in a second sample obtained from the subject after administering the composition to the subject. In some embodiments, the increase is measured directly in the subject after administering the composition to the subject. In some embodiments, the measurement is increased by about 2.5% or more, about 5% or more, or about 7.5% or more, relative to the baseline measurement. In some embodiments, the measurement is increased by about 10% or more, relative to the baseline measurement. In some embodiments, the measurement is increased by about 20% or more, about 30% or more, about 40% or more, about 50% or more, about 60% or more, about 70% or more, about 80% or more, about 90% or more, relative to the baseline measurement. In some embodiments, the measurement is increased by about 100% or more, increased by about 250% or more, increased by about 500% or more, increased by about 750% or more, or increased by about 1000% or more, relative to the baseline measurement. In some embodiments, the measurement is increased by no more than about 2.5%, no more than about 5%, or no more than about 7.5%, relative to the baseline measurement. In some embodiments, the measurement is increased by no more than about 10%, relative to the baseline measurement. In some embodiments, the measurement is increased by no more than about 20%, no more than about 30%, no more than about 40%, no more than about 50%, no more than about 60%, no more than about 70%, no more than about 80%, no more than about 90%, or no more than about 100% relative to the baseline measurement. In some embodiments, the measurement is increased by no more than about 100%, increased by no more than about 250%, increased by no more than about 500%, increased by no more than about 750%, or increased by no more than about 1000%, relative to the baseline measurement. In some embodiments, the measurement is increased by 2.5%, 5%, 7.5%, 10%, 20%, 30%, 40%, 50%, 60%, 70%, 80%, 90%, 100%, 250%, 500%, 750%, or 1000%, or by a range defined by any of the two aforementioned percentages.

[0297] In some embodiments, the measurement is a Montgomery-Asberg Depression Rating Scale (MADRS) score. In some embodiments, the MADRS score comprises a numerical value such as a number of points. In some embodiments, the numerical value is 0, 1, 2, 3, 4, 5, 6, 7, 8, 9, 10, 11, 12, 13, 14, 15, 16, 17, 18, 19, 20, 21, 22, 23, 24, 25, 26, 27, 28, 29, 30, 31, 32, 33, 34, 35, 36, 37, 38, 39, 40 41, 42, 43, 44, 45, 46, 47, 48, 49, 50, 51, 52, 53, 54, 55 56, 57, 58, 59, or 60, or a range defined by any two of the aforementioned numerical values. In some embodiments, the numerical value is 0. In some embodiments, the numerical value is 1-5. In some embodiments, the numerical value is 6-10. In some embodiments, the numerical value is 11-15. In some embodiments, the numerical value is 16-20. In some embodiments, the numerical value is 21-25. In some embodiments, the numerical value is 26-30. In some embodiments, the numerical value is 31-35. In some embodiments, the numerical value is 36-40. In some embodiments, the numerical value is 41-45. In some embodiments, the numerical value is 46-50. In some embodiments, the numerical value is 51-55. In some embodiments, the numerical value is 56-60. In some embodiments, the numerical value is 0-60. In some embodiments, the MADRS score comprises a subscore such as a apparent sadness score, a reported sadness score, a inner tension score, a reduced sleep score, a reduced appetite score, a concentration difficulties score, a lassitude score, a inability to feel score, a pessimistic thoughts score, or a suicidal thoughts score. Each subscore may comprise a numerical value of 0, 1, 2, 3, 4, 5, or 6, or a range of such numerical values. In some embodiments, the MADRS score comprises a numerical value below a threshold numerical value that is indicative of a depressive disorder. In some embodiments, the subscore comprises a numerical value below a threshold numerical value that is indicative of a depressive disorder.

[0298] In some embodiments, the composition reduces the MADRS score relative to the baseline MADRS score. In some embodiments, the reduced MADRS score by observing and/or questioning the subject after administering the composition to the subject. In some embodiments, the MADRS score is decreased by about 2.5% or more, about 5% or more, or about 7.5% or more, relative to the baseline MADRS score. In some embodiments, the MADRS score is decreased by about 10% or more, relative to the baseline MADRS score. In some embodiments, the MADRS score is decreased by about 20% or more, about 30% or more, about 40% or more, about 50% or more, about 60% or more, about 70% or more, about 80% or more, about 90% or more, relative to the baseline MADRS score. In some embodiments, the MADRS score is decreased by no more than about 2.5%, no more than about 5%, or no more than about 7.5%, relative to the baseline MADRS score. In some embodiments, the MADRS score is decreased by no more than about 10%, relative to the baseline MADRS score. In some embodiments, the MADRS score is decreased by no more than about 20%, no more than about 30%, no more than about 40%, no more than about 50%, no more than about 60%, no more than about 70%, no more than about 80%, no more than about 90%, or no more than about 100% relative to the baseline MADRS score. In some embodiments, the MADRS score is decreased by 2.5%, 5%, 7.5%, 10%, 20%, 30%, 40%, 50%, 60%, 70%, 80%, 90%, or 100%, or by a range defined by any of the two aforementioned percentages. In some embodiments, the MADRS score is decreased by 1, 2, 3, 4, 5, 6, 7, 8, 9, 10, 11, 12, 13, 14, 15, 16, 17, 18, 19, 20, 21, 22, 23, 24, 25, 26, 27, 28, 29, 30, 31, 32, 33, 34, 35, 36, 37, 38, 39, 4041, 42, 43, 44, 45, 46, 47, 48, 49, 50, 51, 52, 53, 54, 55 56, 57, 58, 59, or 60 points, relative to the baseline MADRS score, or by a range of points defined by any two of the aforementioned numbers of points relative to the baseline MADRS score. In some embodiments, the MADRS score is decreased by 1-5 points. In some embodiments, the MADRS score is decreased by 6-10 points. In some embodiments, the MADRS score is decreased by 11-15 points. In some embodiments, the MADRS score is decreased by 16-20 points. In some embodiments, the MADRS score is decreased by 21-25 points. In some embodiments, the MADRS score is decreased by 26-30 points. In some embodiments, the MADRS score is decreased by 31-35 points. In some embodiments, the MADRS score is decreased by 36-40 points. In some embodiments, the MADRS score is decreased by 41-45 points. In some embodiments, the MADRS score is decreased by 46-50 points. In some embodiments, the MADRS score is decreased by 51-55 points. In some embodiments, the MADRS score is decreased by 56-60 points.

[0299] In some embodiments, following treatment with the oligonucleotide, the MADRS score of the subject is decreased such that the MADRS score of the subject changes from severe depression to mild or moderate depression, or to normal non-depressed symptomology. For example, the MADRS score of the subject may be below 35 following treatment. In some embodiments, the MADRS score changes from moderate depression to mild depression, or to normal non-depressed symptomology. For example, the MADRS score of the subject may be below 20 following treatment. In some embodiments, the MADRS score changes from mild depression to normal non-depressed symptomology. For example, the MADRS score of the subject may be below 7 following treatment.

[0300] In some embodiments, the measurement is a Hamilton Depression Rating Scale (HDRS) score. In some embodiments, the HDRS score comprises a numerical value such as a number of points. In some embodiments, the numerical value is 0, 1, 2, 3, 4, 5, 6, 7, 8, 9, 10, 11, 12, 13, 14, 15, 16, 17, 18, 19, 20, 21, 22, 23, 24, 25, 26, 27, 28, 29, 30, 31, 32, 33, 34, 35, 36, 37, 38, 39, 40 41, 42, 43, 44, 45, 46, 47, 48, 49, or 50, or a range defined by any two of the aforementioned numerical values. In some embodiments, the numerical value is 0. In some embodiments, the numerical value is 1-5. In some embodiments, the numerical value is 6-10. In some embodiments, the numerical value is 11-15. In some embodiments, the numerical value is 16-20. In some embodiments, the numerical value is 21-25. In some embodiments, the numerical value is 26-30. In some embodiments, the numerical value is 31-35. In some embodiments, the numerical value is 36-40. In some embodiments, the numerical value is 41-45. In some embodiments, the numerical value is 46-50. In some embodiments, the numerical value is 0-50. In some embodiments, the HDRS score comprises a subscore such as a depressed mood score, a feelings of guilt score, a suicide score, a insomnia early in the night score, a insomnia in the middle of the night score, a insomnia in early hours of the morning score, a work and activities score, a retardation score, a agitation score, an anxiety psychic score, an anxiety somatic score, a somatic symptoms of gastrointestinal score, a general somatic score, a genital symptoms score, a hypochondriasis score, a loss of weight score, or a insight score. Subscores may comprise a numerical value of 0, 1, or 2, or a range of such numerical values. Subscores may comprise a numerical value of 0, 1, 2, 3, or 4, or a range of such numerical values. In some embodiments, the HDRS score comprises a numerical value below a threshold numerical value that is indicative of a depressive disorder. For example, a score of below 20 may indicate a lack of moderate or severe depression. In some embodiments, the subscore comprises a numerical value below a threshold numerical value that is indicative of the depressive disorder.

[0301] In some embodiments, the composition reduces the HDRS score relative to the baseline HDRS score. In some embodiments, the reduced HDRS score by observing and/or questioning the subject after administering the composition to the subject. In some embodiments, the HDRS score is decreased by about 2.5% or more, about 5% or more, or about 7.5% or more, relative to the baseline HDRS score. In some embodiments, the HDRS score is decreased by about 10% or more, relative to the baseline HDRS score. In some embodiments, the HDRS score is decreased by about 20% or more, about 30% or more, about 40% or more, about 50% or more, about 60% or more, about 70% or more, about 80% or more, about 90% or more, relative to the baseline HDRS score. In some embodiments, the HDRS score is decreased by no more than about 2.5%, no more than about 5%, or no more than about 7.5%, relative to the baseline HDRS score. In some embodiments, the HDRS score is decreased by no more than about 10%, relative to the baseline HDRS score. In some embodiments, the HDRS score is decreased by no more than about 20%, no more than about 30%, no more than about 40%, no more than about 50%, no more than about 60%, no more than about 70%, no more than about 80%, no more than about 90%, or no more than about 100% relative to the baseline HDRS score. In some embodiments, the HDRS score is decreased by 2.5%, 5%, 7.5%, 10%, 20%, 30%, 40%, 50%, 60%, 70%, 80%, 90%, or 100%, or by a range defined by any of the two aforementioned percentages. In some embodiments, the HDRS score is decreased by 1, 2, 3, 4, 5, 6, 7, 8, 9, 10, 11, 12, 13, 14, 15, 16, 17, 18, 19, 20, 21, 22, 23, 24, 25, 26, 27, 28, 29, 30, 31, 32, 33, 34, 35, 36, 37, 38, 39, 40 41, 42, 43, 44, 45, 46, 47, 48, 49, 50, 51, 52, 53, 54, 55 56, 57, 58, 59, or 60 points, relative to the baseline HDRS score, or by a range of points defined by any two of the aforementioned numbers of points relative to the baseline HDRS score. In some embodiments, the HDRS score is decreased by 1-5 points. In some embodiments, the HDRS score is decreased by 6-10 points. In some embodiments, the HDRS score is decreased by 11-15 points. In some embodiments, the HDRS score is decreased by 16-20 points. In some embodiments, the HDRS score is decreased by 21-25 points. In some embodiments, the HDRS score is decreased by 26-30 points. In some embodiments, the HDRS score is decreased by 31-35 points. In some embodiments, the HDRS score is decreased by 36-40 points. In some embodiments, the HDRS score is decreased by 41-45 points. In some embodiments, the HDRS score is decreased by 46-50 points. In some embodiments, the HDRS score is decreased by 51-55 points. In some embodiments, the HDRS score is decreased by 56-60 points.

[0302] In some embodiments, following treatment with the oligonucleotide, the HDRS score of the subject is decreased such that the HDRS score of the subject changes from severe depression to mild or moderate depression, or to normal non-depressed symptomology. In some embodiments, the HDRS score changes from moderate depression to mild depression, or to normal non-depressed symptomology. For example, the HDRS score of the subject may be below 20 following treatment. In some embodiments, the HDRS score changes from mild depression to normal non-depressed symptomology. For example, the HDRS score of the subject may be below 8 following treatment.

[0303] In some embodiments, the measurement is an anxiety measurement. The anxiety measurement may include an assessment of a symptom of anxiety. In some embodiments, the symptom of anxiety includes stress, worry, or restlessness. In some cases, the symptom of anxiety includes one or more behavioral symptoms such as hypervigilance, irritability, or restlessness. In some cases, the symptom of anxiety includes one or more cognitive symptoms such as lack of concentration, racing thoughts, or unwanted thoughts. In some cases, the symptom of anxiety includes one or more whole body symptoms such as fatigue or sweating. In some cases, the symptoms of anxiety include any of excessive worry, fear, feeling of impending doom, insomnia, nausea, palpitations, or trembling. In some embodiments, the symptom includes one or more panic attacks. The anxiety measurement may include a questionnaire or assessment. The assessment may include an amount, frequency, duration, or intensity of the anxiety or symptoms of anxiety. The anxiety measurement may include an amount of time since feeling anxious or since feeling symptoms of anxiety. The anxiety measurement may include a frequency of feeling anxious or feeling symptoms of anxiety. In some embodiments, the composition reduces the anxiety measurement relative to the baseline anxiety measurement. For example, the composition may reduce the anxiety measurement by 2.5%, 5%, 7.5%, 10%, 20%, 30%, 40%, 50%, 60%, 70%, 80%, 90%, or 100%, or by a range defined by any of the two aforementioned percentages.

[0304] In some embodiments, the measurement is an eating disorder measurement. Examples of eating disorders include anorexia, bulimia, binge eating disorder, pica, rumination, or avoidant eating disorder. In some embodiments, the eating disorder includes anorexia nervosa. In some embodiments, the eating disorder includes bulimia. In some embodiments, the eating disorder includes binge eating. In some embodiments, the eating disorder includes pica. The eating disorder measurement may include an assessment of a symptom of eating disorder. Some examples of symptoms of an eating disorder comprising anorexia nervosa include being considerably underweight compared with people of similar age and height, very restricted eating patterns, an intense fear of gaining weight or persistent behaviors to avoid gaining weight despite being underweight, a relentless pursuit of thinness and unwillingness to maintain a healthy weight, a heavy influence of body weight or perceived body shape on self-esteem, a distorted body image, or denial of being seriously underweight. The eating disorder measurement may include a questionnaire or assessment. The assessment may include an amount, frequency, duration, or intensity of the eating disorder or symptoms. The eating disorder measurement may include an amount of time since engaging in the eating disorder (e.g. binding, purging, or starving). The eating disorder measurement may include a frequency of engaging in the eating disorder. In some embodiments, the composition reduces the eating disorder measurement relative to the baseline eating disorder measurement. For example, the composition may reduce the eating disorder measurement by 2.5%, 5%, 7.5%, 10%, 20%, 30%, 40%, 50%, 60%, 70%, 80%, 90%, or 100%, or by a range defined by any of the two aforementioned percentages.

[0305] In some embodiments, the measurement is a substance-use measurement. In some embodiments, the substance-use measurement includes a determination of a level of addiction to an addictive substance. Examples of addictive substances include alcohol, antianxiety drugs, sedative drugs, caffeine, cannabis (e.g. including marijuana or synthetic cannabinoids), hallucinogens (e.g. LSD, phencyclidine, or psilocybin), inhalants (e.g. paint thinner or some glues), opioids (e.g. fentanyl, morphine, or oxycodone), stimulants (e.g. amphetamines or cocaine), tobacco, or anabolic steroids. The substance abuse measurement may include an amount of time since engaging in the substance-use disorder or experiencing symptoms of the substance-use disorder. The substance abuse measurement may include a frequency of engaging in the substance-use disorder or experiencing symptoms of the substance-use disorder. The determination of a level of addiction to an addictive substance may include a questionnaire or assessment. The substance abuse measurement or the assessment may include an amount, frequency, duration, or intensity of the substance-use disorder or symptoms. The determination of a level of addiction to an addictive substance may include an amount of time since ingesting the addictive substance. The determination of a level of addiction to an addictive substance may include a frequency of ingesting the addictive substance. In some embodiments, the composition reduces the substance abuse measurement relative to the baseline substance abuse measurement. For example, the composition may reduce the e substance abuse measurement by 2.5%, 5%, 7.5%, 10%, 20%, 30%, 40%, 50%, 60%, 70%, 80%, 90%, or 100%, or by a range defined by any of the two aforementioned percentages.

[0306] In some embodiments, the measurement is a PTSD measurement. In some embodiments, the PTSD measurement includes a determination of the level of severity of PTSD. The assessment of a sign or symptom of PTSD may include the number of signs or symptoms of PTSD. The determination of the level of severity of PTSD may include the time since last experiencing a PTSD flashback (e.g., reliving the traumatic event as if it were happening again), nightmare, or severe anxiety. The assessment may include a frequency in PTSD related flashbacks, nightmares, or severe anxiety episodes. The assessment may include a severity of a sign or symptom of PTSD. The assessment may include a frequency of a sign or symptom of PTSD. Exemplary signs and symptoms of PTSD may include intrusive memories (e.g., recurrent, unwanted distressing memories of a traumatic event, severe emotional distress or physical reactions to something that reminiscent of the traumatic event, attempts to avoid thinking or talking about the traumatic event, avoiding places, activities or people reminiscent of the traumatic event, thoughts of hopelessness, memory problems, difficulty maintaining close relationships, and feeling a lack of interest in activities that were once enjoyed. In some embodiments, the composition reduces the PTSD measurement relative to the baseline substance abuse measurement. For example, the composition may reduce the PTSD measurement by 2.5%, 5%, 7.5%, 10%, 20%, 30%, 40%, 50%, 60%, 70%, 80%, 90%, or 100%, or by a range defined by any of the two aforementioned percentages.

[0307] In some embodiments, the measurement is a bipolar disorder measurement. In some embodiments, the bipolar disorder measurement is a sign or symptom of bipolar disorder. The assessment of a sign or symptom of bipolar disorder may include a frequency of a sign or symptom of bipolar disorder. The assessment of a sign or symptom of bipolar disorder may include a severity of a sign or symptom of bipolar disorder. The assessment of a sign or symptom of bipolar disorder may include the number of signs or symptoms of bipolar disorder. Exemplary signs and symptoms of bipolar disorder include any of the bipolar signs and symptoms disclosed herein, including, manic episodes (e.g., experiencing feelings of increased activity, energy, or agitation, an exaggerated sense of well-being and self-confidence, a decreased need for sleep, racing thoughts, distractibility, and a decreased ability to control impulses), and major depressive episodes (e.g., experiencing a depressed mood, marked loss of interest of feelings of pleasure, fatigue or loss of energy, feelings of guilt or worthlessness, and a decreased ability to think or concentrate). In some embodiments, the composition reduces the bipolar disorder measurement relative to the baseline substance abuse measurement. For example, the composition may reduce the bipolar disorder measurement by 2.5%, 5%, 7.5%, 10%, 20%, 30%, 40%, 50%, 60%, 70%, 80%, 90%, or 100%, or by a range defined by any of the two aforementioned percentages.

[0308] In some embodiments, the measurement comprises a schizophrenia measurement. In some embodiments, the schizophrenia measurement is a sign or symptom of schizophrenia. The assessment of a sign or symptom of schizophrenia may include a frequency of a sign or symptom of schizophrenia. The assessment of a sign or symptom of schizophrenia may include a severity of a sign or symptom of schizophrenia. The assessment of a sign or symptom of schizophrenia may include the number of signs or symptoms of schizophrenia. Exemplary signs and symptoms of schizophrenia may include delusions, hallucinations, disorganized thoughts and speech, disorganized or abnormal motor behavior, and negative symptoms (e.g., social withdrawal, anhedonia, avolition, decreased sense of purpose, lack of interest in activities, flat affect, lack of eye contact, and physical inactivity. In some embodiments, the composition reduces the schizophrenia measurement relative to the baseline substance abuse measurement. For example, the composition may reduce the schizophrenia measurement by 2.5%, 5%, 7.5%, 10%, 20%, 30%, 40%, 50%, 60%, 70%, 80%, 90%, or 100%, or by a range defined by any of the two aforementioned percentages.

[0309] In some embodiments, the measurement comprises a psychosis measurement. In some embodiments, the psychosis measurement is a sign or symptom of psychosis. The assessment of a sign or symptom of psychosis may include a frequency of a sign or symptom of psychosis. The assessment of a sign or symptom of psychosis may include a severity of a sign or symptom of psychosis. The assessment of a sign or symptom of psychosis may include the number of signs or symptoms of psychosis. Exemplary signs and symptoms of psychosis may include difficulty concentrating, depressed mood, anxiety, excessive suspiciousness, delusions, and hallucinations. In some embodiments, the composition reduces the schizophrenia measurement relative to the baseline psychosis measurement. For example, the composition may reduce the psychosis measurement by 2.5%, 5%, 7.5%, 10%, 20%, 30%, 40%, 50%, 60%, 70%, 80%, 90%, or 100%, or by a range defined by any of the two aforementioned percentages.

[0310] In some embodiments, the measurement comprises a measurement of a neurological disorder. Non-limiting examples of measurements of neurological disorders include a measurement of cognitive function, a measurement of CNS amyloid plaque(s) (e.g., accumulation), a measurement of CNS tau accumulation, a measurement of CSF beta-amyloid 42 (e.g., accumulation), a measurement of CSF tau (e.g., accumulation), a measurement of CSF phospho-tau (e.g., accumulation), a measurement of Lewy bodies (e.g., accumulation), or a measurement of CSF alpha-synuclein (e.g., accumulation). Further non-limiting examples of measurements include a measurement of headache signs and/or symptoms, a measurement of migraine symptoms and/or signs, a measurement of chronic pain symptoms and/or signs, a measurement of fibromyalgia symptoms and/or signs, a measurement of chronic fatigue syndrome (ME) symptoms and/or signs, and a measurement of motor neuron disease (e.g., ALS) symptoms and/or signs. In some embodiments, the composition reduces the neurological disorder measurement relative to the baseline neurological disorder measurement. For example, the composition may reduce the neurological disorder measurement by 2.5%, 5%, 7.5%, 10%, 20%, 30%, 40%, 50%, 60%, 70%, 80%, 90%, or 100%, or by a range defined by any of the two aforementioned percentages.

[0311] In some embodiments, the measurement is a cognitive function measurement. The cognitive function measurement may be obtained directly from the subject. For example, the subject may be administered a test. The test may include a cognitive test such as the Montreal Cognitive Assessment (MoCA), Mini-Mental State Exam (MMSE), or Mini-Cog. The test may include assessment of basic cognitive functions such as memory, language, executive frontal lobe function, apraxia, visuospatial ability, behavior, mood, orientation, or attention. The cognitive function measurement may include a score. The cognitive function measurement may be indicative of a lack of cognitive impairment. In some embodiments, the cognitive function measurement is indicative of mild cognitive impairment, and the baseline cognitive function measurement is indicative of severe cognitive impairment. The cognitive function measurement may be indicative of a neurological disorder.

[0312] In some embodiments, the composition increases the cognitive function measurement relative to the baseline cognitive function measurement. In some embodiments, the increase is measured directly in the subject after administering the composition to the subject. In some embodiments, the cognitive function measurement is increased by about 2.5% or more, about 5% or more, or about 7.5% or more, relative to the baseline cognitive function measurement. In some embodiments, the cognitive function measurement is increased by about 10% or more, relative to the baseline cognitive function measurement. In some embodiments, the cognitive function measurement is increased by about 20% or more, about 30% or more, about 40% or more, about 50% or more, about 60% or more, about 70% or more, about 80% or more, about 90% or more, relative to the baseline cognitive function measurement. In some embodiments, the cognitive function measurement is increased by about 100% or more, increased by about 250% or more, increased by about 500% or more, increased by about 750% or more, or increased by about 1000% or more, relative to the baseline cognitive function measurement. In some embodiments, the cognitive function measurement is increased by no more than about 2.5%, no more than about 5%, or no more than about 7.5%, relative to the baseline cognitive function measurement. In some embodiments, the cognitive function measurement is increased by no more than about 10%, relative to the baseline cognitive function measurement. In some embodiments, the cognitive function measurement is increased by no more than about 20%, no more than about 30%, no more than about 40%, no more than about 50%, no more than about 60%, no more than about 70%, no more than about 80%, no more than about 90%, or no more than about 100% relative to the baseline cognitive function measurement. In some embodiments, the cognitive function measurement is increased by no more than about 100%, increased by no more than about 250%, increased by no more than about 500%, increased by no more than about⁷50%, or increased by no more than about 1000%, relative to the baseline cognitive function measurement. In some embodiments, the cognitive function measurement is increased by 2.5%, 5%, 7.5%, 10%, 20%, 30%, 40%, 50%, 60%, 70%, 80%, 90%, 100%, 250%, 500%, 750%, or 1000%, or by a range defined by any of the two aforementioned percentages.

[0313] In some embodiments, the measurement is an amyloid plaque measurement. The amyloid plaque measurement may include a central nervous system (CNS) amyloid plaque measurement. In some embodiments, the amyloid plaque measurement includes a concentration or amount. The amyloid plaque measurement may be performed using an imaging device. The imaging device may include a positron emission tomography (PET) device. The amyloid plaque measurement may be performed on a biopsy. The amyloid plaque measurement may be performed using a spinal tap (for example, when the amyloid plaque measurement includes a cerebrospinal fluid (CSF) amyloid plaque measurement). In some embodiments, the amyloid plaque measurement is obtained by an assay such as an immunoassay. The beta amyloid plaque measurement may be indicative of a treatment effect of the oligonucleotide on a neurodegenerative disease such as Alzheimer's disease.

[0314] In some embodiments, the composition reduces the amyloid plaque measurement relative to the baseline amyloid plaque measurement. In some embodiments, the reduction is measured in a second sample obtained from the subject after administering the composition to the subject. In some embodiments, the reduction is measured directly in the subject after administering the composition to the subject. In some embodiments, the amyloid plaque measurement is decreased by about 2.5% or more, about 5% or more, or about 7.5% or more, relative to the baseline amyloid plaque measurement. In some embodiments, the amyloid plaque measurement is decreased by about 10% or more, relative to the baseline amyloid plaque measurement. In some embodiments, the amyloid plaque measurement is decreased by about 20% or more, about 30% or more, about 40% or more, about 50% or more, about 60% or more, about 70% or more, about 80% or more, about 90% or more, relative to the baseline amyloid plaque measurement. In some embodiments, the amyloid plaque measurement is decreased by no more than about 2.5%, no more than about 5%, or no more than about 7.5%, relative to the baseline amyloid plaque measurement. In some embodiments, the amyloid plaque measurement is decreased by no more than about 10%, relative to the baseline amyloid plaque measurement. In some embodiments, the amyloid plaque measurement is decreased by no more than about 20%, no more than about 30%, no more than about 40%, no more than about 50%, no more than about 60%, no more than about 70%, no more than about 80%, no more than about 90%, or no more than about 100% relative to the baseline amyloid plaque measurement. In some embodiments, the amyloid plaque measurement is decreased by 2.5%, 5%, 7.5%, 10%, 20%, 30%, 40%, 50%, 60%, 70%, 80%, 90%, or 100%, or by a range defined by any of the two aforementioned percentages.

[0315] In some embodiments, the measurement is a tau measurement. In some embodiments, the tau measurement includes a concentration or amount. The tau measurement may be performed on a biopsy. In some embodiments, the tau measurement is obtained by an assay such as an immunoassay. The beta tau measurement may be indicative of a treatment effect of the oligonucleotide on a neurodegenerative disease such as Alzheimer's disease or Parkinson's disease.

[0316] In some embodiments, the tau measurement is a central nervous system (CNS) tau measurement. The tau measurement may include a total tau measurement. The tau measurement may include a unphosphorylated tau measurement. The tau measurement may include a phosphorylated tau (phospho-tau) measurement. In some embodiments, the tau measurement is a tau accumulation measurement. In some embodiments, the tau measurement is a CNS tau accumulation measurement. The CNS tau accumulation measurement may be indicative of a treatment effect of the oligonucleotide on a neurodegenerative disease such as Alzheimer's disease or Parkinson's disease.

[0317] In some embodiments, the composition reduces the CNS tau accumulation measurement relative to the baseline CNS tau accumulation measurement. In some embodiments, the reduction is measured in a second sample obtained from the subject after administering the composition to the subject. In some embodiments, the CNS tau accumulation measurement is decreased by about 2.5% or more, about 5% or more, or about 7.5% or more, relative to the baseline CNS tau accumulation measurement. In some embodiments, the CNS tau accumulation measurement is decreased by about 10% or more, relative to the baseline CNS tau accumulation measurement. In some embodiments, the CNS tau accumulation measurement is decreased by about 20% or more, about 30% or more, about 40% or more, about 50% or more, about 60% or more, about 70% or more, about 80% or more, about 90% or more, relative to the baseline CNS tau accumulation measurement. In some embodiments, the CNS tau accumulation measurement is decreased by no more than about 2.5%, no more than about 5%, or no more than about 7.5%, relative to the baseline CNS tau accumulation measurement. In some embodiments, the CNS tau accumulation measurement is decreased by no more than about 10%, relative to the baseline CNS tau accumulation measurement. In some embodiments, the CNS tau accumulation measurement is decreased by no more than about 20%, no more than about 30%, no more than about 40%, no more than about 50%, no more than about 60%, no more than about 70%, no more than about 80%, no more than about 90%, or no more than about 100% relative to the baseline CNS tau accumulation measurement. In some embodiments, the CNS tau accumulation measurement is decreased by 2.5%, 5%, 7.5%, 10%, 20%, 30%, 40%, 50%, 60%, 70%, 80%, 90%, or 100%, or by a range defined by any of the two aforementioned percentages.

[0318] The tau measurement may include a cerebrospinal fluid (CSF) tau measurement. The CSF tau measurement may be performed after use of a spinal tap. The CSF tau measurement may be indicative of a treatment effect of the oligonucleotide on a neurodegenerative disease such as Alzheimer's disease or Parkinson's disease.

[0319] In some embodiments, the composition reduces the CSF tau measurement relative to the baseline CSF tau measurement. In some embodiments, the reduction is measured in a second sample obtained from the subject after administering the composition to the subject. In some embodiments, the reduction is measured in a second CSF sample obtained from the subject after administering the composition to the subject. In some embodiments, the CSF tau measurement is decreased by about 2.5% or more, about 5% or more, or about 7.5% or more, relative to the baseline CSF tau measurement. In some embodiments, the CSF tau measurement is decreased by about 10% or more, relative to the baseline CSF tau measurement. In some embodiments, the CSF tau measurement is decreased by about 20% or more, about 30% or more, about 40% or more, about 50% or more, about 60% or more, about 70% or more, about 80% or more, about 90% or more, relative to the baseline CSF tau measurement. In some embodiments, the CSF tau measurement is decreased by no more than about 2.5%, no more than about 5%, or no more than about 7.5%, relative to the baseline CSF tau measurement. In some embodiments, the CSF tau measurement is decreased by no more than about 10%, relative to the baseline CSF tau measurement. In some embodiments, the CSF tau measurement is decreased by no more than about 20%, no more than about 30%, no more than about 40%, no more than about 50%, no more than about 60%, no more than about 70%, no more than about 80%, no more than about 90%, or no more than about 100% relative to the baseline CSF tau measurement. In some embodiments, the CSF tau measurement is decreased by 2.5%, 5%, 7.5%, 10%, 20%, 30%, 40%, 50%, 60%, 70%, 80%, 90%, or 100%, or by a range defined by any of the two aforementioned percentages.

[0320] The CSF tau measurement may include a CSF phospho-tau measurement. The CSF phospho-tau measurement may include an amount of phospho-tau in relation to total tau or unphosphorylated tau. For example, the CSF phospho-tau measurement may include a phospho-tau/tau ratio. The CSF phospho-tau measurement may be indicative of a treatment effect of the oligonucleotide on a neurodegenerative disease such as Alzheimer's disease or Parkinson's disease.

[0321] In some embodiments, the composition reduces the CSF phospho-tau measurement relative to the baseline CSF phospho-tau measurement. In some embodiments, the reduction is measured in a second sample obtained from the subject after administering the composition to the subject. In some embodiments, the reduction is measured in a second CSF sample obtained from the subject after administering the composition to the subject. In some embodiments, the CSF phospho-tau measurement is decreased by about 2.5% or more, about 5% or more, or about 7.5% or more, relative to the baseline CSF phospho-tau measurement. In some embodiments, the CSF phospho-tau measurement is decreased by about 10% or more, relative to the baseline CSF phospho-tau measurement. In some embodiments, the CSF phospho-tau measurement is decreased by about 20% or more, about 30% or more, about 40% or more, about 50% or more, about 60% or more, about 70% or more, about 80% or more, about 90% or more, relative to the baseline CSF phospho-tau measurement. In some embodiments, the CSF phospho-tau measurement is decreased by no more than about 2.5%, no more than about 5%, or no more than about 7.5%, relative to the baseline CSF phospho-tau measurement. In some embodiments, the CSF phospho-tau measurement is decreased by no more than about 10%, relative to the baseline CSF phospho-tau measurement. In some embodiments, the CSF phospho-tau measurement is decreased by no more than about 20%, no more than about 30%, no more than about 40%, no more than about 50%, no more than about 60%, no more than about 70%, no more than about 80%, no more than about 90%, or no more than about 100% relative to the baseline CSF phospho-tau measurement. In some embodiments, the CSF phospho-tau measurement is decreased by 2.5%, 5%, 7.5%, 10%, 20%, 30%, 40%, 50%, 60%, 70%, 80%, 90%, or 100%, or by a range defined by any of the two aforementioned percentages.

[0322] In some embodiments, the measurement is a alpha-synuclein measurement. The alpha-synuclein measurement may include a cerebrospinal fluid (CSF) alpha-synuclein measurement. In some embodiments, the alpha-synuclein measurement includes a concentration or amount. The alpha-synuclein measurement may be performed on a biopsy. The alpha-synuclein measurement may be performed using a spinal tap (for example, when the alpha-synuclein measurement includes a CSF alpha-synuclein measurement). In some embodiments, the alpha-synuclein measurement is obtained by an assay such as an immunoassay. The alpha-synuclein measurement may be indicative of a treatment effect of the oligonucleotide on a neurodegenerative disease such as Parkinson's disease. The alpha-synuclein measurement may be indicative of a treatment effect of the oligonucleotide on dementia.

[0323] In some embodiments, the composition reduces the alpha-synuclein measurement relative to the baseline alpha-synuclein measurement. In some embodiments, the reduction is measured in a second sample obtained from the subject after administering the composition to the subject. In some embodiments, the alpha-synuclein measurement is decreased by about 2.5% or more, about 5% or more, or about 7.5% or more, relative to the baseline alpha-synuclein measurement. In some embodiments, the alpha-synuclein measurement is decreased by about 10% or more, relative to the baseline alpha-synuclein measurement. In some embodiments, the alpha-synuclein measurement is decreased by about 20% or more, about 30% or more, about 40% or more, about 50% or more, about 60% or more, about 70% or more, about 80% or more, about 90% or more, relative to the baseline alpha-synuclein measurement. In some embodiments, the alpha-synuclein measurement is decreased by no more than about 2.5%, no more than about 5%, or no more than about 7.5%, relative to the baseline alpha-synuclein measurement. In some embodiments, the alpha-synuclein measurement is decreased by no more than about 10%, relative to the baseline alpha-synuclein measurement. In some embodiments, the alpha-synuclein measurement is decreased by no more than about 20%, no more than about 30%, no more than about 40%, no more than about 50%, no more than about 60%, no more than about 70%, no more than about 80%, no more than about 90%, or no more than about 100% relative to the baseline alpha-synuclein measurement. In some embodiments, the alpha-synuclein measurement is decreased by 2.5%, 5%, 7.5%, 10%, 20%, 30%, 40%, 50%, 60%, 70%, 80%, 90%, or 100%, or by a range defined by any of the two aforementioned percentages.

[0324] In some embodiments, the measurement is a Lewy body measurement. The Lewy body measurement may include a central nervous system (CNS) Lewy body measurement. In some embodiments, the Lewy body measurement includes a concentration or amount. The Lewy body measurement may be performed using an imaging device. The imaging device may include a positron emission tomography (PET) device. The beta Lewy body measurement may be indicative of a treatment effect of the oligonucleotide on dementia.

[0325] In some embodiments, the composition reduces the Lewy body measurement relative to the baseline Lewy body measurement. In some embodiments, the reduction is measured in a second sample obtained from the subject after administering the composition to the subject. In some embodiments, the reduction is measured directly in the subject after administering the composition to the subject. In some embodiments, the Lewy body measurement is decreased by about 2.5% or more, about 5% or more, or about 7.5% or more, relative to the baseline Lewy body measurement. In some embodiments, the Lewy body measurement is decreased by about 10% or more, relative to the baseline Lewy body measurement. In some embodiments, the Lewy body measurement is decreased by about 20% or more, about 30% or more, about 40% or more, about 50% or more, about 60% or more, about 70% or more, about 80% or more, about 90% or more, relative to the baseline Lewy body measurement. In some embodiments, the Lewy body measurement is decreased by no more than about 2.5%, no more than about 5%, or no more than about 7.5%, relative to the baseline Lewy body measurement. In some embodiments, the Lewy body measurement is decreased by no more than about 10%, relative to the baseline Lewy body measurement. In some embodiments, the Lewy body measurement is decreased by no more than about 20%, no more than about 30%, no more than about 40%, no more than about 50%, no more than about 60%, no more than about 70%, no more than about 80%, no more than about 90%, or no more than about 100% relative to the baseline Lewy body measurement. In some embodiments, the Lewy body measurement is decreased by 2.5%, 5%, 7.5%, 10%, 20%, 30%, 40%, 0%, 60%, 70%, 80%, 90%, or 100%, or by a range defined by any of the two aforementioned percentages.

[0326] In some embodiments, the measurement is a beta-amyloid 42 measurement. The beta-amyloid 42 measurement may include a cerebrospinal fluid (CSF) beta-amyloid 42 measurement. In some embodiments, the beta-amyloid 42 measurement includes a concentration or amount. The beta-amyloid 42 measurement may be performed on a biopsy. The beta-amyloid 42 measurement may be performed using a spinal tap (for example, when the beta-amyloid 42 measurement includes a CSF beta-amyloid 42 measurement). In some embodiments, the beta-amyloid 42 measurement is obtained by an assay such as an immunoassay. The beta-amyloid 42 measurement may be indicative of a treatment effect of the oligonucleotide on a neurodegenerative disease such as Alzheimer's disease.

[0327] In some embodiments, the composition reduces the CSF beta-amyloid 42 measurement relative to the baseline beta-amyloid 42 measurement. In some embodiments, the reduction is measured in a second sample (for example, a CSF sample) obtained from the subject after administering the composition to the subject. In some embodiments, the CSF beta-amyloid 42 measurement is decreased by about 2.5% or more, about 5% or more, or about 7.5% or more, relative to the baseline CSF beta-amyloid 42 measurement. In some embodiments, the CSF beta-amyloid 42 measurement is decreased by about 10% or more, relative to the baseline CSF beta-amyloid 42 measurement. In some embodiments, the CSF beta-amyloid 42 measurement is decreased by about 20% or more, about 30% or more, about 40% or more, about 50% or more, about 60% or more, about 70% or more, about 80% or more, about 90% or more, relative to the baseline CSF beta-amyloid 42 measurement. In some embodiments, the CSF beta-amyloid 42 measurement is decreased by no more than about 2.5%, no more than about 5%, or no more than about 7.5%, relative to the baseline CSF beta-amyloid 42 measurement. In some embodiments, the CSF beta-amyloid 42 measurement is decreased by no more than about 10%, relative to the baseline CSF beta-amyloid 42 measurement. In some embodiments, the CSF beta-amyloid 42 measurement is decreased by no more than about 20%, no more than about 30%, no more than about 40%, no more than about 50%, no more than about 60%, no more than about 70%, no more than about 80%, no more than about 90%, or no more than about 100% relative to the baseline CSF beta-amyloid 42 measurement. In some embodiments, the CSF beta-amyloid 42 measurement is decreased by 2.5%, 5%, 7.5%, 10%, 20%, 30%, 40%, 50%, 60%, 70%, 80%, 90%, or 100%, or by a range defined by any of the two aforementioned percentages.

[0328] In some embodiments, the measurement is a headache measurement. some embodiments, the headache measurement is a headache sign or symptom measurement. In some embodiments, the headache measurement is a migraine (e.g., with aura or without aura) measurement. In some embodiments, the headache measurement is a frequency of a headache sign or symptom measurement. In some embodiments, the headache measurement is a severity of a headache sign or symptom measurement. In some embodiments, the headache measurement is a number of headache signs or symptoms. Exemplary signs and symptoms of headaches include pain (e.g., deep and constant) in the cheekbones, forehead, bridge of the nose, the cranium, or the back of the neck, aura, photophobia, phonophobia, and emesis. In some embodiments, the composition reduces the headache measurement relative to the baseline headache measurement. For example, the composition may reduce the headache measurement by 2.5%, 5%, 7.5%, 10%, 20%, 30%, 40%, 50%, 60%, 70%, 80%, 90%, or 100%, or by a range defined by any of the two aforementioned percentages.

[0329] In some embodiments, the measurement is a chronic pain measurement. In some embodiments, chronic pain measurement is a fibromyalgia measurement. In some embodiments, the chronic pain measurement is a chronic pain sign or symptom measurement. In some embodiments, the chronic pain measurement is a frequency of a chronic pain sign or symptom measurement. In some embodiments, the chronic pain measurement is a severity of a chronic pain sign or symptom measurement. In some embodiments, the chronic pain measurement is a number of chronic pain signs or symptoms. Exemplary signs and symptoms of fibromyalgia include muscular pain, fatigues, depression, anxiety, sleeplessness, headache, and difficulty concentrating. Exemplary chronic pain disorders include postsurgical pain, post-trauma pain, low back pain, cancer pain, arthritis pain, muscular pain, and neuropathic pain (e.g., diabetic neuropathy). In some embodiments, the composition reduces the chronic pain (e.g., fibromyalgia) measurement relative to the baseline chronic pain (e.g., fibromyalgia) measurement. For example, the composition may reduce the chronic pain (e.g., fibromyalgia) measurement by 2.5%, 5%, 7.5%, 10%, 20%, 30%, 40%, 50%, 60%, 70%, 80%, 90%, or 100%, or by a range defined by any of the two aforementioned percentages.

[0330] In some embodiments, the measurement is a chronic fatigue syndrome (also referred to as myalgic encephalomyelitis) measurement. In some embodiments, the chronic fatigue syndrome measurement is a chronic fatigue syndrome sign or symptom measurement. In some embodiments, the chronic fatigue syndrome measurement is a frequency of a headache sign or symptom measurement. In some embodiments, the chronic fatigue syndrome measurement is a severity of a chronic fatigue syndrome sign or symptom measurement. In some embodiments, the chronic fatigue syndrome n measurement is a number of chronic fatigue syndrome signs or symptoms. Exemplary signs and symptoms of chronic fatigue syndrome include extreme fatigue that lasts for extended periods of time (e.g., for at least six months) that cannot be fully explained by an underlying medical condition, fatigue that worsens with physical or mental activity, pain (e.g., joint or muscular), malaise, forgetfulness, anxiety, and depression. In some embodiments, the composition reduces the chronic fatigue syndrome measurement relative to the baseline chronic fatigue syndrome measurement. For example, the composition may reduce the chronic fatigue syndrome measurement by 2.5%, 5%, 7.5%, 10%, 20%, 30%, 40%, 50%, 60%, 70%, 80%, 90%, or 100%, or by a range defined by any of the two aforementioned percentages.

[0331] In some embodiments, the measurement is a motor neuron disease measurement. In some embodiments, the motor neuron disease measurement is an amyotrophic lateral sclerosis (ALS) measurement. In some embodiments, the motor neuron disease measurement is a motor neuron disease sign or symptom measurement. In some embodiments, the motor neuron disease measurement is a frequency of a motor neuron disease sign or symptom measurement. In some embodiments, the motor neuron disease measurement is a severity of a motor neuron disease sign or symptom measurement. In some embodiments, the motor neuron disease measurement is a number of motor neuron disease signs or symptoms. Exemplary forms of motor neuron diseases include progressive bulbar palsy (PBP), progressive muscular atrophy (PMA), ALS, and primary lateral sclerosis (PLS). Exemplary signs and symptoms of motor neuron diseases include motor control difficulties (e.g., difficulty walking or completing normal daily activities), muscular weakness, slurred speech, difficulty swallowing, and muscle cramps and twitching (e.g., in the arms, shoulders, or tongue). In some embodiments, the composition reduces the motor neuron disease (e.g., ALS) measurement relative to the baseline chronic fatigue syndrome measurement. For example, the composition may reduce the motor neuron disease (e.g., ALS) measurement by 2.5%, 5%, 7.5%, 10%, 20%, 30%, 40%, 50%, 60%, 70%, 80%, 90%, or 100%, or by a range defined by any of the two aforementioned percentages.

[0332] In some embodiments, the measurement is a fibrinogen measurement. In some embodiments, the measurement is a measurement of circulating fibrinogen. In some embodiments, the composition reduces the fibrinogen measurement relative to the baseline fibrinogen measurement. In some embodiments, the composition reduces the circulating fibrinogen measurement relative to the baseline circulating fibrinogen measurement. In some embodiments, the fibrinogen measurement is decreased by about 2.5% or more, about 5% or more, or about 7.5% or more, relative to the baseline fibrinogen measurement. In some embodiments, the fibrinogen measurement is decreased by about 10% or more, relative to the baseline fibrinogen measurement. In some embodiments, the fibrinogen measurement is decreased by about 20% or more, about 30% or more, about 40% or more, about 50% or more, about 60% or more, about 70% or more, about 80% or more, about 90% or more, or about 100%, relative to the baseline fibrinogen measurement. In some embodiments, the fibrinogen measurement is decreased by no more than about 2.5%, no more than about 5%, or no more than about 7.5%, relative to the baseline fibrinogen measurement. In some embodiments, the fibrinogen measurement is decreased by no more than about 10%, relative to the baseline fibrinogen measurement. In some embodiments, the fibrinogen measurement is decreased by no more than about 20%, no more than about 30%, no more than about 40%, no more than about 50%, no more than about 60%, no more than about 70%, no more than about 80%, no more than about 90%, or no more than about 100% relative to the baseline fibrinogen measurement. In some embodiments, the fibrinogen measurement is decreased by 2.5%, 5%, 7.5%, 19%, 20%, 30%, 40%, 50%, 60%, 70%, 80%, 90%, or 100%, or by a range defined by any of the two aforementioned percentages.

[0333] In some embodiments, the measurement is a clotting or coagulation measurement. In some embodiments, the clotting or coagulation measurement is a prothrombin time (PT). In some embodiments, the clotting or coagulation measurement is an International Normalized Ratio (INR). In some embodiments, the clotting or coagulation measurement is an activated partial thromboplastin time (aPTT). In some embodiments, the composition reduces the clotting or coagulation measurement relative to the baseline clotting or coagulation measurement. In some embodiments, the clotting or coagulation measurement is increased by about 2.5% or more, about 5% or more, or about 7.5% or more, relative to the baseline clotting or coagulation measurement. In some embodiments, the clotting or coagulation measurement is increased by about 10% or more, relative to the baseline clotting or coagulation measurement. In some embodiments, the clotting or coagulation measurement is increased by about 20% or more, about 30% or more, about 40% or more, about 50% or more, about 60% or more, about 70% or more, about 80% or more, about 90% or more, or about 100%, relative to the baseline clotting or coagulation measurement. In some embodiments, the clotting or coagulation measurement is increased by no more than about 2.5%, no more than about 5%, or no more than about 7.5%, relative to the baseline clotting or coagulation measurement. In some embodiments, the clotting or coagulation measurement is increased by no more than about 10%, relative to the baseline clotting or coagulation measurement. In some embodiments, the clotting or coagulation measurement is increased by no more than about 20%, no more than about 30%, no more than about 40%, no more than about 50%, no more than about 60%, no more than about 70%, no more than about 80%, no more than about 90%, or no more than about 100% relative to the baseline clotting or coagulation measurement. In some embodiments, the clotting or coagulation measurement is increased by 2.5%, 5%, 7.5%, 15%, 20%, 30%, 40%, 50%, 60%, 70%, 80%, 90%, or 100%, or by a range defined by any of the two aforementioned percentages. In some embodiments, the clotting or coagulation measurement is increased be no more than about 20%, no more than about 40%, no more than about 80%, no more than about 100%, no more than about 120%, no more than about 140%, no more than about 160%, no more than about 180%, no more than about 200%, no more than about 300%, no more than about 400%, no more than about 500%, no more than about 600%, no more than about 700%<no more than about 800%, no more than about 900%, or more than about 1000% relative to the baseline clotting or coagulation measurement.

[0334] In some embodiments, the measurement is an FGG protein measurement. In some embodiments, the FGG protein measurement comprises an FGG protein level. In some embodiments, the FGG protein level is a FGG protein level in the whole body. In some embodiments, the FGG protein level is a FGG protein level in the blood. In some embodiments, the FGG protein level is a FGG protein level in the brain. In some embodiments, the FGG protein level is a FGG protein level in the liver. In some embodiments, the FGG protein level is indicated as a mass or percentage of FGG protein per sample weight. In some embodiments, the FGG protein level is indicated as a mass or percentage of FGG protein per sample volume. In some embodiments, the FGG protein level is indicated as a mass or percentage of FGG protein per total protein within the sample. In some embodiments, the FGG protein measurement is a circulating FGG protein measurement. In some embodiments, the FGG protein measurement is obtained by an assay such as an immunoassay, a colorimetric assay, or a fluorescence assay.

[0335] In some embodiments, the composition reduces the FGG protein measurement relative to the baseline FGG protein measurement. In some embodiments, the composition reduces circulating FGG protein levels relative to the baseline FGG protein measurement. In some embodiments, the composition reduces tissue (e.g. brain, liver, blood, or whole body) FGG protein levels relative to the baseline FGG protein measurement. In some embodiments, the reduced FGG protein levels are measured in a second sample obtained from the subject after administering the composition to the subject. In some embodiments, the FGG protein measurement is decreased by about 2.5% or more, about 5% or more, or about 7.5% or more, relative to the baseline FGG protein measurement. In some embodiments, the FGG protein measurement is decreased by about 10% or more, relative to the baseline FGG protein measurement. In some embodiments, the FGG protein measurement is decreased by about 20% or more, about 30% or more, about 40% or more, about 50% or more, about 60% or more, about 70% or more, about 80% or more, about 90% or more, or about 100%, relative to the baseline FGG protein measurement. In some embodiments, the FGG protein measurement is decreased by no more than about 2.5%, no more than about 5%, or no more than about 7.5%, relative to the baseline FGG protein measurement. In some embodiments, the FGG protein measurement is decreased by no more than about 10%, relative to the baseline FGG protein measurement. In some embodiments, the FGG protein measurement is decreased by no more than about 20%, no more than about 30%, no more than about 40%, no more than about 50%, no more than about 60%, no more than about 70%, no more than about 80%, no more than about 90%, or no more than about 100% relative to the baseline FGG protein measurement. In some embodiments, the FGG protein measurement is decreased by 2.5%, 5%, 7.5%, 19%, 20%, 30%, 40%, 50%, 60%, 70%, 80%, 90%, or 100%, or by a range defined by any of the two aforementioned percentages.

[0336] In some embodiments, the measurement is an FGG mRNA measurement. In some embodiments, the FGG mRNA measurement comprises an FGG mRNA level. In some embodiments, the FGG mRNA level is measured in the liver. In some embodiments, the FGG mRNA level is indicated as an amount or percentage of FGG mRNA per sample weight. In some embodiments, the FGG mRNA level is indicated as an amount or percentage of FGG mRNA per sample volume. In some embodiments, the FGG mRNA level is indicated as an amount or percentage of FGG mRNA per total mRNA within the sample. In some embodiments, the FGG mRNA level is indicated as an amount or percentage of FGG mRNA per total nucleic acids within the sample. In some embodiments, the FGG mRNA level is indicated relative to another mRNA level, such as an mRNA level of a housekeeping gene, within the sample. In some embodiments, the FGG mRNA measurement is obtained by an assay such as a PCR assay. In some embodiments, the PCR comprises qPCR. In some embodiments, the PCR comprises reverse transcription of the FGG mRNA.

[0337] In some embodiments, the composition reduces the FGG mRNA measurement relative to the baseline FGG mRNA measurement. In some embodiments, the FGG mRNA measurement is obtained in a second sample obtained from the subject after administering the composition to the subject. In some embodiments, the composition reduces FGG mRNA levels relative to the baseline FGG mRNA levels. In some embodiments, the reduced FGG mRNA levels are measured in a second sample obtained from the subject after administering the composition to the subject. In some embodiments, the second sample is a liver sample. In some embodiments, the FGG mRNA measurement is reduced by about 2.5% or more, about 5% or more, or about 7.5% or more, relative to the baseline v mRNA measurement. In some embodiments, the FGG mRNA measurement is decreased by about 10% or more, relative to the baseline FGG mRNA measurement. In some embodiments, the FGG mRNA measurement is decreased by about 20% or more, about 30% or more, about 40% or more, about 50% or more, about 60% or more, about 70% or more, about 80% or more, about 90% or more, or about 100%, relative to the baseline FGG mRNA measurement. In some embodiments, the FGG mRNA measurement is decreased by no more than about 2.5%, no more than about 5%, or no more than about 7.5%, relative to the baseline FGG mRNA measurement. In some embodiments, the FGG mRNA measurement is decreased by no more than about 10%, relative to the baseline FGG mRNA measurement. In some embodiments, the FGG mRNA measurement is decreased by no more than about 20%, no more than about 30%, no more than about 40%, no more than about 50%, no more than about 60%, no more than about 70%, no more than about 80%, no more than about 90%, or no more than about 100%, relative to the baseline FGG mRNA measurement. In some embodiments, the FGG mRNA measurement is decreased by 2.5%, 5%, 7.5%, 10%, 20%, 30%, 40%, 50%, 60%, 70%, 80%, 90%, or 100% or by a range defined by any of the two aforementioned percentages.

### III. Definitions

[0338] Unless defined otherwise, all terms of art, notations and other technical and scientific terms or terminology used herein are intended to have the same meaning as is commonly understood by one of ordinary skill in the art to which the claimed subject matter pertains. In some cases, terms with commonly understood meanings are defined herein for clarity and/or for ready reference, and the inclusion of such definitions herein should not necessarily be construed to represent a substantial difference over what is generally understood in the art.

[0339] Throughout this application, various embodiments may be presented in a range format. It should be understood that the description in range format is merely for convenience and brevity and should not be construed as an inflexible limitation on the scope of the disclosure. Accordingly, the description of a range should be considered to have specifically disclosed all the possible subranges as well as individual numerical values within that range. For example, description of a range such as from 1 to 6 should be considered to have specifically disclosed subranges such as from 1 to 3, from 1 to 4, from 1 to 5, from 2 to 4, from 2 to 6, from 3 to 6 etc., as well as individual numbers within that range, for example, 1, 2, 3, 4, 5, and 6. This applies regardless of the breadth of the range.

[0340] As used in the specification and claims, the singular forms “a”, “an” and “the” include plural references unless the context clearly dictates otherwise. For example, the term “a sample” includes a plurality of samples, including mixtures thereof.

[0341] The terms “determining,” “measuring,” “evaluating,” “assessing,” “assaying,” and “analyzing” are often used interchangeably herein to refer to forms of measurement. The terms include determining if an element is present or not (for example, detection). These terms can include quantitative, qualitative or quantitative and qualitative determinations. Assessing can be relative or absolute. “Detecting the presence of” can include determining the amount of something present in addition to determining whether it is present or absent depending on the context.

[0342] The terms “subject,” and “patient” may be used interchangeably herein. A “subject” can be a biological entity containing expressed genetic materials. The biological entity can be a plant, animal, or microorganism, including, for example, bacteria, viruses, fungi, and protozoa. The subject can be a mammal. The mammal can be a human. The subject may be diagnosed or suspected of being at high risk for a disease. In some cases, the subject is not necessarily diagnosed or suspected of being at high risk for the disease.

[0343] As used herein, the term “about” a number refers to that number plus or minus 10% of that number. The term “about” a range refers to that range minus 10% of its lowest value and plus 10% of its greatest value.

[0344] As used herein, the terms “treatment” or “treating” are used in reference to a pharmaceutical or other intervention regimen for obtaining beneficial or desired results in the recipient. Beneficial or desired results include but are not limited to a therapeutic benefit and/or a prophylactic benefit. A therapeutic benefit may refer to eradication or amelioration of symptoms or of an underlying disorder being treated. Also, a therapeutic benefit can be achieved with the eradication or amelioration of one or more of the symptoms associated with the underlying disorder such that an improvement is observed in the subject, notwithstanding that the subject may still be afflicted with the underlying disorder. A prophylactic effect includes delaying, preventing, or eliminating the appearance of a disease or condition, delaying or eliminating the onset of symptoms of a disease or condition, slowing, halting, or reversing the progression of a disease or condition, or any combination thereof. For prophylactic benefit, a subject at risk of developing a particular disease, or to a subject reporting one or more of the symptoms of a disease may undergo treatment, even though a diagnosis of this disease may not have been made.

[0345] Some embodiments refer to nucleic acid sequence information. It is contemplated that in some embodiments, thymine (T) may be interchanged with uracil (U), or vice versa. For example, some sequences in the sequence listing may recite Ts, but these may be replaced with Us in some embodiments. In some oligonucleotides with nucleic acid sequences that include uracil, the uracil may be replaced with thymine. Similarly, in some oligonucleotides with nucleic acid sequences that include thymine, the thymine may be replaced with uracil. In some embodiments, an oligonucleotide such as an siRNA comprises or consists of RNA. In some embodiments, the oligonucleotide may comprise or consist of DNA. For example, an ASO may include DNA.

[0346] The section headings used herein are for organizational purposes only and are not to be construed as limiting the subject matter described.

### VI. Examples

### Example 1: Functional Variants in FGG Demonstrate Protective Associations for Psychiatric and Neurodegenerative Diseases

[0347] Variants in FGG were evaluated for associations with psychiatric diseases and neurological diseases, and related traits in approximately 382,000 individuals with genotype data from the UK Biobank cohort. Variants evaluated included: (1) rs148685782, a rare (AAF=0.004) FGG missense variant (Ala108Gly; A108G), which has been experimentally characterized as a FGG ↓ pQTL and (2) rs6063, a rare (AAF=0.005) FGG missense variant (Gly191Arg; G191R), which may have a deleterious impact on the FGG protein. Both variants were considered hypomorphic or loss-of-function variants that result in a decrease in the abundance or activity of the FGG gene product. Also evaluated was an FGG gene burden test which aggregated rs148685782, rs6063 and several additional rare nonsynonymous variants in FGG.

[0348] The analyses presented used a logistic or linear regression model with age, sex and the first ten principal components of genetic ancestry as covariates. The analyses resulted in identification of associations for the individual FGG variants and the FGG gene burden (Tables 1A-1C and 2A-2B).

TABLE 1A
FGG psychiatric disease associations

| | | | | Major Depressive | |
|---|---|---|---|---|---|
| | | | | Disorder (n = 35,446) | |
| Variant | Gene | Function | AAF | P value | OR |
| rs148685782 | FGG | Missense A108G; | 0.004 | 0.004 | ↓0.861 |
| | | FGG IpQTL | | | |
| rs6063 | FGG | Missense G191R | 0.005 | 0.003 | ↓0.848 |
| Gene Burden | FGG | Aggregation of rare | 0.009 | 6.45E−06 | ↓0.857 |
| | | deleterious variants | | | |

TABLE 1B
FGG psychiatric disease associations

| | |
|---|---|
| SSRI Medication | Intentional Self Harm |
| (n = 40,721) | (n = 2,395) |

| Variant | P value | OR | P value | OR |
|---|---|---|---|---|
| rs148685782 | 0.01 | ↓0.906 | 8.14E−04 | ↓0.359 |
| rs6063 | 0.015 | ↓0.917 | 0.201 | ↓0.760 |
| Gene Burden | 1.64E−04 | ↓0.907 | 0.002 | ↓0.575 |

TABLE 1C
FGG psychiatric disease associations

| | Family History of Severe | | Post-Traumatic Stress | |
|---|---|---|---|---|
| | Depression (n = 49,923) | | Disorder (n = 672) | |
| Variant | P value | OR | P value | OR |
| rs148685782 | 0.135 | ↓0.920 | 0.072 | ↓0.509 |
| rs6063 | 0.063 | ↓0.907 | 0.032 | ↓0.454 |
| Gene Burden | 0.032 | ↓0.922 | 0.009 | ↓0.508 |

TABLE 2A
FGG neurological disease associations

| | | | | Alzheimer's | |
|---|---|---|---|---|---|
| | | | | Disease (n = 1,995) | |
| Variant | Gene | Function | AAF | P value | OR |
| rs148685782 | FGG | Missense A108G; | 0.004 | 0.031 | ↓0.562 |
| | | FGG IpQTL | | | |
| rs6063 | FGG | Missense G191R | 0.005 | 0.058 | ↓0.635 |
| Gene Burden | FGG | Aggregation of rare | 0.009 | 0.006 | ↓0.604 |
| | | deleterious variants | | | |

TABLE 2B
FGG neurological disease associations

| | Early-Onset | | | | | |
|---|---|---|---|---|---|---|
| | Alzheimer's | | | | | |
| | Disease | | Dementia | | Headache | |
| | (n = 190) | | (n = 4,283) | | (n = 25,534) | |
| Variant | P value | OR | P value | OR | P value | OR |
| rs148685782 | 0.275 | ↓0.513 | 0.034 | ↓0.739 | 3.03E−04 | ↓0.835 |
| rs6063 | 0.182 | ↓0.446 | 0.068 | ↓0.779 | 0.605 | ↓0.980 |
| Gene Burden | 0.026 | ↓0.229 | 0.012 | ↓0.783 | 0.004 | ↓0.911 |

[0349] The data demonstrated that there were protective associations with multiple psychiatric and depression-related traits (shown in Tables 1A-1C). The rs148685782 (A108G) variant, the rs6063 (G191R) variant, and the FGG gene burden were all associated with protection from major depressive disorder. Additionally, evaluated FGG variants were individually and collectively associated with decreased risk of SSRI medication-use, intentional self-harm, a family history of severe depression and post-traumatic stress disorder.

[0350] Additionally, there were protective associations with multiple neurological and dementia-related traits (shown in Table 2A-2B). The rs148685782 (A108G) variant, the rs6063 (G191R) variant and the FGG gene burden were individually and collectively associated with decreased risk of Alzheimer's Disease, early-onset Alzheimer's Disease, all-cause dementia and headache disorders.

[0351] These results indicate that loss-of-function of FGG resulted in protection from a range of psychiatric disorders, including depressive disorders, and from a range of neurological disorders, including Alzheimer's Disease; and suggest that therapeutic inhibition of FGG may result in similar disease-protective effects.

### Example 2: Bioinformatic Selection of Sequences in Order to Identify Therapeutic siRNAs to Downmodulate Expression of FGG mRNA

[0352] Screening sets were defined based on bioinformatic analysis. Therapeutic siRNAs were designed to target human FGG, and the FGG sequence of at least one toxicology-relevant species; in this case, non-human primates (NHP) including rhesus and cynomolgus monkeys. Drivers for the design of the screening set were predicted specificity of the siRNAs against the transcriptome of the relevant species as well as cross-reactivity between species. Predicted specificity in human, rhesus monkey, cynomolgus monkey, mouse, rat, rabbit, dog, gerbil, Syrian hamster, Chinese hamster, guinea pig, and naked mole rat was determined for sense (S) and antisense (AS) strands. These were assigned a “specificity score” which considered the likelihood of unintended downregulation of any other transcript by full or partial complementarity of an siRNA strand (up to 2 mismatches within positions 2-18) as well as the number and positions of mismatches. Thus, off-target(s) transcripts for antisense and sense strands of each siRNA were identified. In addition, the number of potential off-targets was used as an additional specificity factor in the specificity score. As identified, siRNAs with high specificity and a low number of predicted off-targets provide a benefit of increased targeting specificity.

[0353] In addition to selecting siRNA sequences with high sequence specificity to FGG mRNA, siRNA sequences within the seed region were analyzed for similarity to seed regions of known miRNAs. siRNAs can function in a miRNA like manner via base-pairing with complementary sequences within the 3′-UTR of mRNA molecules. The complementarity typically encompassed the 5′-bases at positions 2-7 of the miRNA (seed region). To circumvent siRNAs to act via functional miRNA binding sites, siRNA strands containing natural miRNA seed regions can be avoided. Seed regions identified in miRNAs from human, mouse, rat, rhesus monkey, dog, rabbit and pig are referred to as “conserved”. Combining the “specificity score” with miRNA seed analysis yielded a “specificity category”. This was divided into categories 1-4, with 1 having the highest specificity and 4 having the lowest specificity. Each strand of the siRNA was assigned to a specificity category.

[0354] Specificity and species cross-reactivity was assessed for human, rhesus monkey, cynomolgus monkey, mouse, rat, rabbit, dog, gerbil, Syrian hamster, Chinese hamster, guinea pig and naked mole rat FGG. The analysis was based on a canonical siRNA design using 19 bases and 17 bases (without considering positions 1 and 19) for cross-reactivity. Full match as well as single mismatch analyses were included.

[0355] Analysis of the Genome Aggregation Database (gnomAD, available at gnomad.broadinstitute.org/) to identify siRNAs targeting regions with known SNPs was also carried out to identify siRNAs that may be non-functional in individuals containing the SNP. Information regarding the positions of SNPs within the target sequence as well as minor allele frequency (MAF) in case data was obtained in this analysis.

[0356] Initial analysis of the relevant FGG mRNA sequence revealed few sequences that fulfil the specificity parameters and at the same time target FGG mRNA in all of the analyzed relevant species. Therefore, it was decided to design independent screening subsets for the therapeutic siRNAs.

[0357] The siRNAs in these subsets were selected based on the ability to recognize at least the human, cynomolgus monkey, rhesus monkey FGG sequences. Therefore, the siRNAs in these subsets may be used to target human FGG in a therapeutic setting.

[0358] The number of siRNA sequences derived from human FGG mRNA (ENST00000404648, SEQ ID NO: 3621) without consideration of specificity or species cross-reactivity was 1742 (sense and antisense strand sequences included in SEQ ID NOS: 1-3484).

[0359] Prioritizing sequences for target specificity, species cross-reactivity, miRNA seed region sequences and SNPs as described above yielded subset A. Subset A includes 319 siRNAs whose base sequences are shown in Table 3.

TABLE 3
Subset A siRNAs

| | Sense | | Antisense | |
|---|---|---|---|---|
| | strand | | strand | |
| siRNA | SEQ | Sense strand sequence | SEQ ID | Antisense strand sequence |
| Name | ID NO: | (5′-3′) | NO: | (5′-3′) |
| siRNA 224 | 224 | CCGGGCACTCAGACATCAT | 1966 | ATGATGTCTGAGTGCCCGG |
| siRNA 233 | 233 | CAGACATCATGAGTTGGTC | 1975 | GACCAACTCATGATGTCTG |
| siRNA 234 | 234 | AGACATCATGAGTTGGTCC | 1976 | GGACCAACTCATGATGTCT |
| siRNA 235 | 235 | GACATCATGAGTTGGTCCT | 1977 | AGGACCAACTCATGATGTC |
| siRNA 248 | 248 | GGTCCTTGCACCCCCGGAA | 1990 | TTCCGGGGGTGCAAGGACC |
| siRNA 249 | 249 | GTCCTTGCACCCCCGGAAT | 1991 | ATTCCGGGGGTGCAAGGAC |
| siRNA 250 | 250 | TCCTTGCACCCCCGGAATT | 1992 | AATTCCGGGGGTGCAAGGA |
| siRNA 251 | 251 | CCTTGCACCCCCGGAATTT | 1993 | AAATTCCGGGGGTGCAAGG |
| siRNA 253 | 253 | TTGCACCCCCGGAATTTAA | 1995 | TTAAATTCCGGGGGTGCAA |
| siRNA 254 | 254 | TGCACCCCCGGAATTTAAT | 1996 | ATTAAATTCCGGGGGTGCA |
| siRNA 255 | 255 | GCACCCCCGGAATTTAATT | 1997 | AATTAAATTCCGGGGGTGC |
| siRNA 258 | 258 | CCCCCGGAATTTAATTCTC | 2000 | GAGAATTAAATTCCGGGGG |
| siRNA 260 | 260 | CCCGGAATTTAATTCTCTA | 2002 | TAGAGAATTAAATTCCGGG |
| siRNA 261 | 261 | CCGGAATTTAATTCTCTAC | 2003 | GTAGAGAATTAAATTCCGG |
| siRNA 262 | 262 | CGGAATTTAATTCTCTACT | 2004 | AGTAGAGAATTAAATTCCG |
| siRNA 269 | 269 | TAATTCTCTACTTCTATGC | 2011 | GCATAGAAGTAGAGAATTA |
| siRNA 273 | 273 | TCTCTACTTCTATGCTCTT | 2015 | AAGAGCATAGAAGTAGAGA |
| siRNA 274 | 274 | CTCTACTTCTATGCTCTTT | 2016 | AAAGAGCATAGAAGTAGAG |
| siRNA 275 | 275 | TCTACTTCTATGCTCTTTT | 2017 | AAAAGAGCATAGAAGTAGA |
| siRNA 297 | 297 | TCTCTCTTCAACATGTGTA | 2039 | TACACATGTTGAAGAGAGA |
| siRNA 310 | 310 | TGTGTAGCATATGTTGCTA | 2052 | TAGCAACATATGCTACACA |
| siRNA 311 | 311 | GTGTAGCATATGTTGCTAC | 2053 | GTAGCAACATATGCTACAC |
| siRNA 319 | 319 | TATGTTGCTACCAGAGACA | 2061 | TGTCTCTGGTAGCAACATA |
| siRNA 322 | 322 | GTTGCTACCAGAGACAACT | 2064 | AGTTGTCTCTGGTAGCAAC |
| siRNA 323 | 323 | TTGCTACCAGAGACAACTG | 2065 | CAGTTGTCTCTGGTAGCAA |
| siRNA 324 | 324 | TGCTACCAGAGACAACTGC | 2066 | GCAGTTGTCTCTGGTAGCA |
| siRNA 329 | 329 | CCAGAGACAACTGCTGCAT | 2071 | ATGCAGCAGTTGTCTCTGG |
| siRNA 335 | 335 | ACAACTGCTGCATCTTAGA | 2077 | TCTAAGATGCAGCAGTTGT |
| siRNA 342 | 342 | CTGCATCTTAGATGAAAGA | 2084 | TCTTTCATCTAAGATGCAG |
| siRNA 343 | 343 | TGCATCTTAGATGAAAGAT | 2085 | ATCTTTCATCTAAGATGCA |
| siRNA 344 | 344 | GCATCTTAGATGAAAGATT | 2086 | AATCTTTCATCTAAGATGC |
| siRNA 347 | 347 | TCTTAGATGAAAGATTCGG | 2089 | CCGAATCTTTCATCTAAGA |
| siRNA 348 | 348 | CTTAGATGAAAGATTCGGT | 2090 | ACCGAATCTTTCATCTAAG |
| siRNA 349 | 349 | TTAGATGAAAGATTCGGTA | 2091 | TACCGAATCTTTCATCTAA |
| siRNA 350 | 350 | TAGATGAAAGATTCGGTAG | 2092 | CTACCGAATCTTTCATCTA |
| siRNA 351 | 351 | AGATGAAAGATTCGGTAGT | 2093 | ACTACCGAATCTTTCATCT |
| siRNA 352 | 352 | GATGAAAGATTCGGTAGTT | 2094 | AACTACCGAATCTTTCATC |
| siRNA 354 | 354 | TGAAAGATTCGGTAGTTAT | 2096 | ATAACTACCGAATCTTTCA |
| siRNA 355 | 355 | GAAAGATTCGGTAGTTATT | 2097 | AATAACTACCGAATCTTTC |
| siRNA 359 | 359 | GATTCGGTAGTTATTGTCC | 2101 | GGACAATAACTACCGAATC |
| siRNA 361 | 361 | TTCGGTAGTTATTGTCCAA | 2103 | TTGGACAATAACTACCGAA |
| siRNA 362 | 362 | TCGGTAGTTATTGTCCAAC | 2104 | GTTGGACAATAACTACCGA |
| siRNA 363 | 363 | CGGTAGTTATTGTCCAACT | 2105 | AGTTGGACAATAACTACCG |
| siRNA 364 | 364 | GGTAGTTATTGTCCAACTA | 2106 | TAGTTGGACAATAACTACC |
| siRNA 365 | 365 | GTAGTTATTGTCCAACTAC | 2107 | GTAGTTGGACAATAACTAC |
| siRNA 366 | 366 | TAGTTATTGTCCAACTACC | 2108 | GGTAGTTGGACAATAACTA |
| siRNA 367 | 367 | AGTTATTGTCCAACTACCT | 2109 | AGGTAGTTGGACAATAACT |
| siRNA 369 | 369 | TTATTGTCCAACTACCTGT | 2111 | ACAGGTAGTTGGACAATAA |
| siRNA 372 | 372 | TTGTCCAACTACCTGTGGC | 2114 | GCCACAGGTAGTTGGACAA |
| siRNA 373 | 373 | TGTCCAACTACCTGTGGCA | 2115 | TGCCACAGGTAGTTGGACA |
| siRNA 384 | 384 | CTGTGGCATTGCAGATTTC | 2126 | GAAATCTGCAATGCCACAG |
| siRNA 386 | 386 | GTGGCATTGCAGATTTCCT | 2128 | AGGAAATCTGCAATGCCAC |
| siRNA 392 | 392 | TTGCAGATTTCCTGTCTAC | 2134 | GTAGACAGGAAATCTGCAA |
| siRNA 397 | 397 | GATTTCCTGTCTACTTATC | 2139 | GATAAGTAGACAGGAAATC |
| siRNA 398 | 398 | ATTTCCTGTCTACTTATCA | 2140 | TGATAAGTAGACAGGAAAT |
| siRNA 399 | 399 | TTTCCTGTCTACTTATCAA | 2141 | TTGATAAGTAGACAGGAAA |
| siRNA 406 | 406 | TCTACTTATCAAACCAAAG | 2148 | CTTTGGTTTGATAAGTAGA |
| siRNA 411 | 411 | TTATCAAACCAAAGTAGAC | 2153 | GTCTACTTTGGTTTGATAA |
| siRNA 412 | 412 | TATCAAACCAAAGTAGACA | 2154 | TGTCTACTTTGGTTTGATA |
| siRNA 423 | 423 | AGTAGACAAGGATCTACAG | 2165 | CTGTAGATCCTTGTCTACT |
| siRNA 426 | 426 | AGACAAGGATCTACAGTCT | 2168 | AGACTGTAGATCCTTGTCT |
| siRNA 432 | 432 | GGATCTACAGTCTTTGGAA | 2174 | TTCCAAAGACTGTAGATCC |
| siRNA 434 | 434 | ATCTACAGTCTTTGGAAGA | 2176 | TCTTCCAAAGACTGTAGAT |
| siRNA 437 | 437 | TACAGTCTTTGGAAGACAT | 2179 | ATGTCTTCCAAAGACTGTA |
| siRNA 447 | 447 | GGAAGACATCTTACATCAA | 2189 | TTGATGTAAGATGTCTTCC |
| siRNA 449 | 449 | AAGACATCTTACATCAAGT | 2191 | ACTTGATGTAAGATGTCTT |
| siRNA 450 | 450 | AGACATCTTACATCAAGTT | 2192 | AACTTGATGTAAGATGTCT |
| siRNA 493 | 493 | CAGCTGATAAAAGCAATCC | 2235 | GGATTGCTTTTATCAGCTG |
| siRNA 494 | 494 | AGCTGATAAAAGCAATCCA | 2236 | TGGATTGCTTTTATCAGCT |
| siRNA 497 | 497 | TGATAAAAGCAATCCAACT | 2239 | AGTTGGATTGCTTTTATCA |
| siRNA 504 | 504 | AGCAATCCAACTCACTTAT | 2246 | ATAAGTGAGTTGGATTGCT |
| siRNA 505 | 505 | GCAATCCAACTCACTTATA | 2247 | TATAAGTGAGTTGGATTGC |
| siRNA 507 | 507 | AATCCAACTCACTTATAAT | 2249 | ATTATAAGTGAGTTGGATT |
| siRNA 508 | 508 | ATCCAACTCACTTATAATC | 2250 | GATTATAAGTGAGTTGGAT |
| siRNA 509 | 509 | TCCAACTCACTTATAATCC | 2251 | GGATTATAAGTGAGTTGGA |
| siRNA 510 | 510 | CCAACTCACTTATAATCCT | 2252 | AGGATTATAAGTGAGTTGG |
| siRNA 511 | 511 | CAACTCACTTATAATCCTG | 2253 | CAGGATTATAAGTGAGTTG |
| siRNA 514 | 514 | CTCACTTATAATCCTGATG | 2256 | CATCAGGATTATAAGTGAG |
| siRNA 515 | 515 | TCACTTATAATCCTGATGA | 2257 | TCATCAGGATTATAAGTGA |
| siRNA 522 | 522 | TAATCCTGATGAATCATCA | 2264 | TGATGATTCATCAGGATTA |
| siRNA 523 | 523 | AATCCTGATGAATCATCAA | 2265 | TTGATGATTCATCAGGATT |
| siRNA 528 | 528 | TGATGAATCATCAAAACCA | 2270 | TGGTTTTGATGATTCATCA |
| siRNA 539 | 539 | CAAAACCAAATATGATAGA | 2281 | TCTATCATATTTGGTTTTG |
| siRNA 541 | 541 | AAACCAAATATGATAGACG | 2283 | CGTCTATCATATTTGGTTT |
| siRNA 544 | 544 | CCAAATATGATAGACGCTG | 2286 | CAGCGTCTATCATATTTGG |
| siRNA 546 | 546 | AAATATGATAGACGCTGCT | 2288 | AGCAGCGTCTATCATATTT |
| siRNA 548 | 548 | ATATGATAGACGCTGCTAC | 2290 | GTAGCAGCGTCTATCATAT |
| siRNA 554 | 554 | TAGACGCTGCTACTTTGAA | 2296 | TTCAAAGTAGCAGCGTCTA |
| siRNA 556 | 556 | GACGCTGCTACTTTGAAGT | 2298 | ACTTCAAAGTAGCAGCGTC |
| siRNA 573 | 573 | GTCCAGGAAAATGTTAGAA | 2315 | TTCTAACATTTTCCTGGAC |
| siRNA 599 | 599 | TGAAATATGAAGCATCGAT | 2341 | ATCGATGCTTCATATTTCA |
| siRNA 600 | 600 | GAAATATGAAGCATCGATT | 2342 | AATCGATGCTTCATATTTC |
| siRNA 601 | 601 | AAATATGAAGCATCGATTT | 2343 | AAATCGATGCTTCATATTT |
| siRNA 604 | 604 | TATGAAGCATCGATTTTAA | 2346 | TTAAAATCGATGCTTCATA |
| siRNA 606 | 606 | TGAAGCATCGATTTTAACA | 2348 | TGTTAAAATCGATGCTTCA |
| siRNA 607 | 607 | GAAGCATCGATTTTAACAC | 2349 | GTGTTAAAATCGATGCTTC |
| siRNA 608 | 608 | AAGCATCGATTTTAACACA | 2350 | TGTGTTAAAATCGATGCTT |
| siRNA 609 | 609 | AGCATCGATTTTAACACAT | 2351 | ATGTGTTAAAATCGATGCT |
| siRNA 619 | 619 | TTAACACATGACTCAAGTA | 2361 | TACTTGAGTCATGTGTTAA |
| siRNA 624 | 624 | ACATGACTCAAGTATTCGA | 2366 | TCGAATACTTGAGTCATGT |
| siRNA 625 | 625 | CATGACTCAAGTATTCGAT | 2367 | ATCGAATACTTGAGTCATG |
| siRNA 633 | 633 | AAGTATTCGATATTTGCAG | 2375 | CTGCAAATATCGAATACTT |
| siRNA 634 | 634 | AGTATTCGATATTTGCAGG | 2376 | CCTGCAAATATCGAATACT |
| siRNA 661 | 661 | AATTCAAATAATCAAAAGA | 2403 | TCTTTTGATTATTTGAATT |
| siRNA 689 | 689 | TGAAAGAGAAGGTAGCCCA | 2431 | TGGGCTACCTTCTCTTTCA |
| siRNA 691 | 691 | AAAGAGAAGGTAGCCCAGC | 2433 | GCTGGGCTACCTTCTCTTT |
| siRNA 709 | 709 | CTTGAAGCACAGTGCCAGG | 2451 | CCTGGCACTGTGCTTCAAG |
| siRNA 716 | 716 | CACAGTGCCAGGAACCTTG | 2458 | CAAGGTTCCTGGCACTGTG |
| siRNA 720 | 720 | GTGCCAGGAACCTTGCAAA | 2462 | TTTGCAAGGTTCCTGGCAC |
| siRNA 724 | 724 | CAGGAACCTTGCAAAGACA | 2466 | TGTCTTTGCAAGGTTCCTG |
| siRNA 728 | 728 | AACCTTGCAAAGACACGGT | 2470 | ACCGTGTCTTTGCAAGGTT |
| siRNA 729 | 729 | ACCTTGCAAAGACACGGTG | 2471 | CACCGTGTCTTTGCAAGGT |
| siRNA 730 | 730 | CCTTGCAAAGACACGGTGC | 2472 | GCACCGTGTCTTTGCAAGG |
| siRNA 731 | 731 | CTTGCAAAGACACGGTGCA | 2473 | TGCACCGTGTCTTTGCAAG |
| siRNA 732 | 732 | TTGCAAAGACACGGTGCAA | 2474 | TTGCACCGTGTCTTTGCAA |
| siRNA 733 | 733 | TGCAAAGACACGGTGCAAA | 2475 | TTTGCACCGTGTCTTTGCA |
| siRNA 734 | 734 | GCAAAGACACGGTGCAAAT | 2476 | ATTTGCACCGTGTCTTTGC |
| siRNA 736 | 736 | AAAGACACGGTGCAAATCC | 2478 | GGATTTGCACCGTGTCTTT |
| siRNA 748 | 748 | CAAATCCATGATATCACTG | 2490 | CAGTGATATCATGGATTTG |
| siRNA 749 | 749 | AAATCCATGATATCACTGG | 2491 | CCAGTGATATCATGGATTT |
| siRNA 751 | 751 | ATCCATGATATCACTGGGA | 2493 | TCCCAGTGATATCATGGAT |
| siRNA 752 | 752 | TCCATGATATCACTGGGAA | 2494 | TTCCCAGTGATATCATGGA |
| siRNA 753 | 753 | CCATGATATCACTGGGAAA | 2495 | TTTCCCAGTGATATCATGG |
| siRNA 770 | 770 | AAGATTGTCAAGACATTGC | 2512 | GCAATGTCTTGACAATCTT |
| siRNA 778 | 778 | CAAGACATTGCCAATAAGG | 2520 | CCTTATTGGCAATGTCTTG |
| siRNA 780 | 780 | AGACATTGCCAATAAGGGA | 2522 | TCCCTTATTGGCAATGTCT |
| siRNA 783 | 783 | CATTGCCAATAAGGGAGCT | 2525 | AGCTCCCTTATTGGCAATG |
| siRNA 784 | 784 | ATTGCCAATAAGGGAGCTA | 2526 | TAGCTCCCTTATTGGCAAT |
| siRNA 785 | 785 | TTGCCAATAAGGGAGCTAA | 2527 | TTAGCTCCCTTATTGGCAA |
| siRNA 786 | 786 | TGCCAATAAGGGAGCTAAA | 2528 | TTTAGCTCCCTTATTGGCA |
| siRNA 791 | 791 | ATAAGGGAGCTAAACAGAG | 2533 | CTCTGTTTAGCTCCCTTAT |
| siRNA 794 | 794 | AGGGAGCTAAACAGAGCGG | 2536 | CCGCTCTGTTTAGCTCCCT |
| siRNA 795 | 795 | GGGAGCTAAACAGAGCGGG | 2537 | CCCGCTCTGTTTAGCTCCC |
| siRNA 796 | 796 | GGAGCTAAACAGAGCGGGC | 2538 | GCCCGCTCTGTTTAGCTCC |
| siRNA 797 | 797 | GAGCTAAACAGAGCGGGCT | 2539 | AGCCCGCTCTGTTTAGCTC |
| siRNA 800 | 800 | CTAAACAGAGCGGGCTTTA | 2542 | TAAAGCCCGCTCTGTTTAG |
| siRNA 802 | 802 | AAACAGAGCGGGCTTTACT | 2544 | AGTAAAGCCCGCTCTGTTT |
| siRNA 805 | 805 | CAGAGCGGGCTTTACTTTA | 2547 | TAAAGTAAAGCCCGCTCTG |
| siRNA 806 | 806 | AGAGCGGGCTTTACTTTAT | 2548 | ATAAAGTAAAGCCCGCTCT |
| siRNA 812 | 812 | GGCTTTACTTTATTAAACC | 2554 | GGTTTAATAAAGTAAAGCC |
| siRNA 821 | 821 | TTATTAAACCTCTGAAAGC | 2563 | GCTTTCAGAGGTTTAATAA |
| siRNA 822 | 822 | TATTAAACCTCTGAAAGCT | 2564 | AGCTTTCAGAGGTTTAATA |
| siRNA 825 | 825 | TAAACCTCTGAAAGCTAAC | 2567 | GTTAGCTTTCAGAGGTTTA |
| siRNA 826 | 826 | AAACCTCTGAAAGCTAACC | 2568 | GGTTAGCTTTCAGAGGTTT |
| siRNA 827 | 827 | AACCTCTGAAAGCTAACCA | 2569 | TGGTTAGCTTTCAGAGGTT |
| siRNA 828 | 828 | ACCTCTGAAAGCTAACCAG | 2570 | CTGGTTAGCTTTCAGAGGT |
| siRNA 833 | 833 | TGAAAGCTAACCAGCAATT | 2575 | AATTGCTGGTTAGCTTTCA |
| siRNA 841 | 841 | AACCAGCAATTCTTAGTCT | 2583 | AGACTAAGAATTGCTGGTT |
| siRNA 844 | 844 | CAGCAATTCTTAGTCTACT | 2586 | AGTAGACTAAGAATTGCTG |
| siRNA 850 | 850 | TTCTTAGTCTACTGTGAAA | 2592 | TTTCACAGTAGACTAAGAA |
| siRNA 860 | 860 | ACTGTGAAATCGATGGGTC | 2602 | GACCCATCGATTTCACAGT |
| siRNA 861 | 861 | CTGTGAAATCGATGGGTCT | 2603 | AGACCCATCGATTTCACAG |
| siRNA 865 | 865 | GAAATCGATGGGTCTGGAA | 2607 | TTCCAGACCCATCGATTTC |
| siRNA 866 | 866 | AAATCGATGGGTCTGGAAA | 2608 | TTTCCAGACCCATCGATTT |
| siRNA 877 | 877 | TCTGGAAATGGATGGACTG | 2619 | CAGTCCATCCATTTCCAGA |
| siRNA 893 | 893 | CTGTGTTTCAGAAGAGACT | 2635 | AGTCTCTTCTGAAACACAG |
| siRNA 894 | 894 | TGTGTTTCAGAAGAGACTT | 2636 | AAGTCTCTTCTGAAACACA |
| siRNA 904 | 904 | AAGAGACTTGATGGCAGTG | 2646 | CACTGCCATCAAGTCTCTT |
| siRNA 916 | 916 | GGCAGTGTAGATTTCAAGA | 2658 | TCTTGAAATCTACACTGCC |
| siRNA 929 | 929 | TCAAGAAAAACTGGATTCA | 2671 | TGAATCCAGTTTTTCTTGA |
| siRNA 932 | 932 | AGAAAAACTGGATTCAATA | 2674 | TATTGAATCCAGTTTTTCT |
| siRNA 955 | 955 | GAAGGATTTGGACATCTGT | 2697 | ACAGATGTCCAAATCCTTC |
| siRNA 956 | 956 | AAGGATTTGGACATCTGTC | 2698 | GACAGATGTCCAAATCCTT |
| siRNA 963 | 963 | TGGACATCTGTCTCCTACT | 2705 | AGTAGGAGACAGATGTCCA |
| siRNA 964 | 964 | GGACATCTGTCTCCTACTG | 2706 | CAGTAGGAGACAGATGTCC |
| siRNA 966 | 966 | ACATCTGTCTCCTACTGGC | 2708 | GCCAGTAGGAGACAGATGT |
| siRNA 969 | 969 | TCTGTCTCCTACTGGCACA | 2711 | TGTGCCAGTAGGAGACAGA |
| siRNA 972 | 972 | GTCTCCTACTGGCACAACA | 2714 | TGTTGTGCCAGTAGGAGAC |
| siRNA 973 | 973 | TCTCCTACTGGCACAACAG | 2715 | CTGTTGTGCCAGTAGGAGA |
| siRNA 983 | 983 | GCACAACAGAATTTTGGCT | 2725 | AGCCAAAATTCTGTTGTGC |
| siRNA 1003 | 1003 | GGAAATGAGAAGATTCATT | 2745 | AATGAATCTTCTCATTTCC |
| siRNA 1011 | 1011 | GAAGATTCATTTGATAAGC | 2753 | GCTTATCAAATGAATCTTC |
| siRNA 1013 | 1013 | AGATTCATTTGATAAGCAC | 2755 | GTGCTTATCAAATGAATCT |
| siRNA 1022 | 1022 | TGATAAGCACACAGTCTGC | 2764 | GCAGACTGTGTGCTTATCA |
| siRNA 1024 | 1024 | ATAAGCACACAGTCTGCCA | 2766 | TGGCAGACTGTGTGCTTAT |
| siRNA 1025 | 1025 | TAAGCACACAGTCTGCCAT | 2767 | ATGGCAGACTGTGTGCTTA |
| siRNA 1027 | 1027 | AGCACACAGTCTGCCATCC | 2769 | GGATGGCAGACTGTGTGCT |
| siRNA 1041 | 1041 | CATCCCATATGCATTAAGA | 2783 | TCTTAATGCATATGGGATG |
| siRNA 1046 | 1046 | CATATGCATTAAGAGTGGA | 2788 | TCCACTCTTAATGCATATG |
| siRNA 1047 | 1047 | ATATGCATTAAGAGTGGAA | 2789 | TTCCACTCTTAATGCATAT |
| siRNA 1052 | 1052 | CATTAAGAGTGGAACTGGA | 2794 | TCCAGTTCCACTCTTAATG |
| siRNA 1060 | 1060 | GTGGAACTGGAAGACTGGA | 2802 | TCCAGTCTTCCAGTTCCAC |
| siRNA 1071 | 1071 | AGACTGGAATGGCAGAACC | 2813 | GGTTCTGCCATTCCAGTCT |
| siRNA 1079 | 1079 | ATGGCAGAACCAGTACTGC | 2821 | GCAGTACTGGTTCTGCCAT |
| siRNA 1085 | 1085 | GAACCAGTACTGCAGACTA | 2827 | TAGTCTGCAGTACTGGTTC |
| siRNA 1088 | 1088 | CCAGTACTGCAGACTATGC | 2830 | GCATAGTCTGCAGTACTGG |
| siRNA 1089 | 1089 | CAGTACTGCAGACTATGCC | 2831 | GGCATAGTCTGCAGTACTG |
| siRNA 1091 | 1091 | GTACTGCAGACTATGCCAT | 2833 | ATGGCATAGTCTGCAGTAC |
| siRNA 1095 | 1095 | TGCAGACTATGCCATGTTC | 2837 | GAACATGGCATAGTCTGCA |
| siRNA 1110 | 1110 | GTTCAAGGTGGGACCTGAA | 2852 | TTCAGGTCCCACCTTGAAC |
| siRNA 1111 | 1111 | TTCAAGGTGGGACCTGAAG | 2853 | CTTCAGGTCCCACCTTGAA |
| siRNA 1120 | 1120 | GGACCTGAAGCTGACAAGT | 2862 | ACTTGTCAGCTTCAGGTCC |
| siRNA 1123 | 1123 | CCTGAAGCTGACAAGTACC | 2865 | GGTACTTGTCAGCTTCAGG |
| siRNA 1126 | 1126 | GAAGCTGACAAGTACCGCC | 2868 | GGCGGTACTTGTCAGCTTC |
| siRNA 1127 | 1127 | AAGCTGACAAGTACCGCCT | 2869 | AGGCGGTACTTGTCAGCTT |
| siRNA 1128 | 1128 | AGCTGACAAGTACCGCCTA | 2870 | TAGGCGGTACTTGTCAGCT |
| siRNA 1129 | 1129 | GCTGACAAGTACCGCCTAA | 2871 | TTAGGCGGTACTTGTCAGC |
| siRNA 1130 | 1130 | CTGACAAGTACCGCCTAAC | 2872 | GTTAGGCGGTACTTGTCAG |
| siRNA 1131 | 1131 | TGACAAGTACCGCCTAACA | 2873 | TGTTAGGCGGTACTTGTCA |
| siRNA 1132 | 1132 | GACAAGTACCGCCTAACAT | 2874 | ATGTTAGGCGGTACTTGTC |
| siRNA 1133 | 1133 | ACAAGTACCGCCTAACATA | 2875 | TATGTTAGGCGGTACTTGT |
| siRNA 1134 | 1134 | CAAGTACCGCCTAACATAT | 2876 | ATATGTTAGGCGGTACTTG |
| siRNA 1135 | 1135 | AAGTACCGCCTAACATATG | 2877 | CATATGTTAGGCGGTACTT |
| siRNA 1136 | 1136 | AGTACCGCCTAACATATGC | 2878 | GCATATGTTAGGCGGTACT |
| siRNA 1137 | 1137 | GTACCGCCTAACATATGCC | 2879 | GGCATATGTTAGGCGGTAC |
| siRNA 1138 | 1138 | TACCGCCTAACATATGCCT | 2880 | AGGCATATGTTAGGCGGTA |
| siRNA 1139 | 1139 | ACCGCCTAACATATGCCTA | 2881 | TAGGCATATGTTAGGCGGT |
| siRNA 1140 | 1140 | CCGCCTAACATATGCCTAC | 2882 | GTAGGCATATGTTAGGCGG |
| siRNA 1141 | 1141 | CGCCTAACATATGCCTACT | 2883 | AGTAGGCATATGTTAGGCG |
| siRNA 1143 | 1143 | CCTAACATATGCCTACTTC | 2885 | GAAGTAGGCATATGTTAGG |
| siRNA 1146 | 1146 | AACATATGCCTACTTCGCT | 2888 | AGCGAAGTAGGCATATGTT |
| siRNA 1147 | 1147 | ACATATGCCTACTTCGCTG | 2889 | CAGCGAAGTAGGCATATGT |
| siRNA 1148 | 1148 | CATATGCCTACTTCGCTGG | 2890 | CCAGCGAAGTAGGCATATG |
| siRNA 1149 | 1149 | ATATGCCTACTTCGCTGGT | 2891 | ACCAGCGAAGTAGGCATAT |
| siRNA 1151 | 1151 | ATGCCTACTTCGCTGGTGG | 2893 | CCACCAGCGAAGTAGGCAT |
| siRNA 1174 | 1174 | GCTGGAGATGCCTTTGATG | 2916 | CATCAAAGGCATCTCCAGC |
| siRNA 1178 | 1178 | GAGATGCCTTTGATGGCTT | 2920 | AAGCCATCAAAGGCATCTC |
| siRNA 1182 | 1182 | TGCCTTTGATGGCTTTGAT | 2924 | ATCAAAGCCATCAAAGGCA |
| siRNA 1197 | 1197 | TGATTTTGGCGATGATCCT | 2939 | AGGATCATCGCCAAAATCA |
| siRNA 1198 | 1198 | GATTTTGGCGATGATCCTA | 2940 | TAGGATCATCGCCAAAATC |
| siRNA 1203 | 1203 | TGGCGATGATCCTAGTGAC | 2945 | GTCACTAGGATCATCGCCA |
| siRNA 1205 | 1205 | GCGATGATCCTAGTGACAA | 2947 | TTGTCACTAGGATCATCGC |
| siRNA 1206 | 1206 | CGATGATCCTAGTGACAAG | 2948 | CTTGTCACTAGGATCATCG |
| siRNA 1215 | 1215 | TAGTGACAAGTTTTTCACA | 2957 | TGTGAAAAACTTGTCACTA |
| siRNA 1227 | 1227 | TTTCACATCCCATAATGGC | 2969 | GCCATTATGGGATGTGAAA |
| siRNA 1236 | 1236 | CCATAATGGCATGCAGTTC | 2978 | GAACTGCATGCCATTATGG |
| siRNA 1242 | 1242 | TGGCATGCAGTTCAGTACC | 2984 | GGTACTGAACTGCATGCCA |
| siRNA 1243 | 1243 | GGCATGCAGTTCAGTACCT | 2985 | AGGTACTGAACTGCATGCC |
| siRNA 1248 | 1248 | GCAGTTCAGTACCTGGGAC | 2990 | GTCCCAGGTACTGAACTGC |
| siRNA 1249 | 1249 | CAGTTCAGTACCTGGGACA | 2991 | TGTCCCAGGTACTGAACTG |
| siRNA 1264 | 1264 | GACAATGACAATGATAAGT | 3006 | ACTTATCATTGTCATTGTC |
| siRNA 1265 | 1265 | ACAATGACAATGATAAGTT | 3007 | AACTTATCATTGTCATTGT |
| siRNA 1278 | 1278 | TAAGTTTGAAGGCAACTGT | 3020 | ACAGTTGCCTTCAAACTTA |
| siRNA 1286 | 1286 | AAGGCAACTGTGCTGAACA | 3028 | TGTTCAGCACAGTTGCCTT |
| siRNA 1287 | 1287 | AGGCAACTGTGCTGAACAG | 3029 | CTGTTCAGCACAGTTGCCT |
| siRNA 1298 | 1298 | CTGAACAGGATGGATCTGG | 3040 | CCAGATCCATCCTGTTCAG |
| siRNA 1304 | 1304 | AGGATGGATCTGGTTGGTG | 3046 | CACCAACCAGATCCATCCT |
| siRNA 1311 | 1311 | ATCTGGTTGGTGGATGAAC | 3053 | GTTCATCCACCAACCAGAT |
| siRNA 1315 | 1315 | GGTTGGTGGATGAACAAGT | 3057 | ACTTGTTCATCCACCAACC |
| siRNA 1319 | 1319 | GGTGGATGAACAAGTGTCA | 3061 | TGACACTTGTTCATCCACC |
| siRNA 1320 | 1320 | GTGGATGAACAAGTGTCAC | 3062 | GTGACACTTGTTCATCCAC |
| siRNA 1323 | 1323 | GATGAACAAGTGTCACGCT | 3065 | AGCGTGACACTTGTTCATC |
| siRNA 1324 | 1324 | ATGAACAAGTGTCACGCTG | 3066 | CAGCGTGACACTTGTTCAT |
| siRNA 1325 | 1325 | TGAACAAGTGTCACGCTGG | 3067 | CCAGCGTGACACTTGTTCA |
| siRNA 1326 | 1326 | GAACAAGTGTCACGCTGGC | 3068 | GCCAGCGTGACACTTGTTC |
| siRNA 1339 | 1339 | GCTGGCCATCTCAATGGAG | 3081 | CTCCATTGAGATGGCCAGC |
| siRNA 1342 | 1342 | GGCCATCTCAATGGAGTTT | 3084 | AAACTCCATTGAGATGGCC |
| siRNA 1344 | 1344 | CCATCTCAATGGAGTTTAT | 3086 | ATAAACTCCATTGAGATGG |
| siRNA 1348 | 1348 | CTCAATGGAGTTTATTACC | 3090 | GGTAATAAACTCCATTGAG |
| siRNA 1349 | 1349 | TCAATGGAGTTTATTACCA | 3091 | TGGTAATAAACTCCATTGA |
| siRNA 1354 | 1354 | GGAGTTTATTACCAAGGTG | 3096 | CACCTTGGTAATAAACTCC |
| siRNA 1356 | 1356 | AGTTTATTACCAAGGTGGC | 3098 | GCCACCTTGGTAATAAACT |
| siRNA 1359 | 1359 | TTATTACCAAGGTGGCACT | 3101 | AGTGCCACCTTGGTAATAA |
| siRNA 1362 | 1362 | TTACCAAGGTGGCACTTAC | 3104 | GTAAGTGCCACCTTGGTAA |
| siRNA 1365 | 1365 | CCAAGGTGGCACTTACTCA | 3107 | TGAGTAAGTGCCACCTTGG |
| siRNA 1368 | 1368 | AGGTGGCACTTACTCAAAA | 3110 | TTTTGAGTAAGTGCCACCT |
| siRNA 1374 | 1374 | CACTTACTCAAAAGCATCT | 3116 | AGATGCTTTTGAGTAAGTG |
| siRNA 1383 | 1383 | AAAAGCATCTACTCCTAAT | 3125 | ATTAGGAGTAGATGCTTTT |
| siRNA 1384 | 1384 | AAAGCATCTACTCCTAATG | 3126 | CATTAGGAGTAGATGCTTT |
| siRNA 1385 | 1385 | AAGCATCTACTCCTAATGG | 3127 | CCATTAGGAGTAGATGCTT |
| siRNA 1386 | 1386 | AGCATCTACTCCTAATGGT | 3128 | ACCATTAGGAGTAGATGCT |
| siRNA 1387 | 1387 | GCATCTACTCCTAATGGTT | 3129 | AACCATTAGGAGTAGATGC |
| siRNA 1389 | 1389 | ATCTACTCCTAATGGTTAT | 3131 | ATAACCATTAGGAGTAGAT |
| siRNA 1390 | 1390 | TCTACTCCTAATGGTTATG | 3132 | CATAACCATTAGGAGTAGA |
| siRNA 1391 | 1391 | CTACTCCTAATGGTTATGA | 3133 | TCATAACCATTAGGAGTAG |
| siRNA 1394 | 1394 | CTCCTAATGGTTATGATAA | 3136 | TTATCATAACCATTAGGAG |
| siRNA 1395 | 1395 | TCCTAATGGTTATGATAAT | 3137 | ATTATCATAACCATTAGGA |
| siRNA 1396 | 1396 | CCTAATGGTTATGATAATG | 3138 | CATTATCATAACCATTAGG |
| siRNA 1401 | 1401 | TGGTTATGATAATGGCATT | 3143 | AATGCCATTATCATAACCA |
| siRNA 1404 | 1404 | TTATGATAATGGCATTATT | 3146 | AATAATGCCATTATCATAA |
| siRNA 1409 | 1409 | ATAATGGCATTATTTGGGC | 3151 | GCCCAAATAATGCCATTAT |
| siRNA 1410 | 1410 | TAATGGCATTATTTGGGCC | 3152 | GGCCCAAATAATGCCATTA |
| siRNA 1417 | 1417 | ATTATTTGGGCCACTTGGA | 3159 | TCCAAGTGGCCCAAATAAT |
| siRNA 1418 | 1418 | TTATTTGGGCCACTTGGAA | 3160 | TTCCAAGTGGCCCAAATAA |
| siRNA 1419 | 1419 | TATTTGGGCCACTTGGAAA | 3161 | TTTCCAAGTGGCCCAAATA |
| siRNA 1420 | 1420 | ATTTGGGCCACTTGGAAAA | 3162 | TTTTCCAAGTGGCCCAAAT |
| siRNA 1426 | 1426 | GCCACTTGGAAAACCCGGT | 3168 | ACCGGGTTTTCCAAGTGGC |
| siRNA 1427 | 1427 | CCACTTGGAAAACCCGGTG | 3169 | CACCGGGTTTTCCAAGTGG |
| siRNA 1428 | 1428 | CACTTGGAAAACCCGGTGG | 3170 | CCACCGGGTTTTCCAAGTG |
| siRNA 1431 | 1431 | TTGGAAAACCCGGTGGTAT | 3173 | ATACCACCGGGTTTTCCAA |
| siRNA 1432 | 1432 | TGGAAAACCCGGTGGTATT | 3174 | AATACCACCGGGTTTTCCA |
| siRNA 1434 | 1434 | GAAAACCCGGTGGTATTCC | 3176 | GGAATACCACCGGGTTTTC |
| siRNA 1435 | 1435 | AAAACCCGGTGGTATTCCA | 3177 | TGGAATACCACCGGGTTTT |
| siRNA 1440 | 1440 | CCGGTGGTATTCCATGAAG | 3182 | CTTCATGGAATACCACCGG |
| siRNA 1461 | 1461 | AACCACTATGAAGATAATC | 3203 | GATTATCTTCATAGTGGTT |
| siRNA 1462 | 1462 | ACCACTATGAAGATAATCC | 3204 | GGATTATCTTCATAGTGGT |
| siRNA 1466 | 1466 | CTATGAAGATAATCCCATT | 3208 | AATGGGATTATCTTCATAG |
| siRNA 1467 | 1467 | TATGAAGATAATCCCATTC | 3209 | GAATGGGATTATCTTCATA |
| siRNA 1477 | 1477 | ATCCCATTCAACAGACTCA | 3219 | TGAGTCTGTTGAATGGGAT |
| siRNA 1478 | 1478 | TCCCATTCAACAGACTCAC | 3220 | GTGAGTCTGTTGAATGGGA |
| siRNA 1482 | 1482 | ATTCAACAGACTCACAATT | 3224 | AATTGTGAGTCTGTTGAAT |
| siRNA 1485 | 1485 | CAACAGACTCACAATTGGA | 3227 | TCCAATTGTGAGTCTGTTG |
| siRNA 1487 | 1487 | ACAGACTCACAATTGGAGA | 3229 | TCTCCAATTGTGAGTCTGT |
| siRNA 1488 | 1488 | CAGACTCACAATTGGAGAA | 3230 | TTCTCCAATTGTGAGTCTG |
| siRNA 1519 | 1519 | CACCTGGGGGGAGCCAAAC | 3261 | GTTTGGCTCCCCCCAGGTG |
| siRNA 1533 | 1533 | CAAACAGGCTGGAGACGTT | 3275 | AACGTCTCCAGCCTGTTTG |
| siRNA 1540 | 1540 | GCTGGAGACGTTTAAAAGA | 3282 | TCTTTTAAACGTCTCCAGC |
| siRNA 1583 | 1583 | TTAAAGGACTTTATCTGAA | 3325 | TTCAGATAAAGTCCTTTAA |
| siRNA 1588 | 1588 | GGACTTTATCTGAACAGAG | 3330 | CTCTGTTCAGATAAAGTCC |
| siRNA 1592 | 1592 | TTTATCTGAACAGAGAGAT | 3334 | ATCTCTCTGTTCAGATAAA |
| siRNA 1597 | 1597 | CTGAACAGAGAGATATAAT | 3339 | ATTATATCTCTCTGTTCAG |
| siRNA 1615 | 1615 | TATTTTTCCTATTGGACAA | 3357 | TTGTCCAATAGGAAAAATA |
| siRNA 1617 | 1617 | TTTTTCCTATTGGACAATG | 3359 | CATTGTCCAATAGGAAAAA |
| siRNA 1622 | 1622 | CCTATTGGACAATGGACTT | 3364 | AAGTCCATTGTCCAATAGG |
| siRNA 1623 | 1623 | CTATTGGACAATGGACTTG | 3365 | CAAGTCCATTGTCCAATAG |
| siRNA 1626 | 1626 | TTGGACAATGGACTTGCAA | 3368 | TTGCAAGTCCATTGTCCAA |
| siRNA 1627 | 1627 | TGGACAATGGACTTGCAAA | 3369 | TTTGCAAGTCCATTGTCCA |
| siRNA 1647 | 1647 | CTTCACTTCATTTTAAGAG | 3389 | CTCTTAAAATGAAGTGAAG |
| siRNA 1648 | 1648 | TTCACTTCATTTTAAGAGC | 3390 | GCTCTTAAAATGAAGTGAA |
| siRNA 1649 | 1649 | TCACTTCATTTTAAGAGCA | 3391 | TGCTCTTAAAATGAAGTGA |
| siRNA 1664 | 1664 | AGCAAAAGACCCCATGTTG | 3406 | CAACATGGGGTCTTTTGCT |
| siRNA 1672 | 1672 | ACCCCATGTTGAAAACTCC | 3414 | GGAGTTTTCAACATGGGGT |
| siRNA 1678 | 1678 | TGTTGAAAACTCCATAACA | 3420 | TGTTATGGAGTTTTCAACA |
| siRNA 1679 | 1679 | GTTGAAAACTCCATAACAG | 3421 | CTGTTATGGAGTTTTCAAC |
| siRNA 1680 | 1680 | TTGAAAACTCCATAACAGT | 3422 | ACTGTTATGGAGTTTTCAA |
| siRNA 1691 | 1691 | ATAACAGTTTTATGCTGAT | 3433 | ATCAGCATAAAACTGTTAT |
| siRNA 1696 | 1696 | AGTTTTATGCTGATGATAA | 3438 | TTATCATCAGCATAAAACT |
| siRNA 1700 | 1700 | TTATGCTGATGATAATTTA | 3442 | TAAATTATCATCAGCATAA |
| siRNA 1710 | 1710 | GATAATTTATCTACATGCA | 3452 | TGCATGTAGATAAATTATC |

[0360] The siRNAs in subset A were selected to have the following characteristics:
[0361] Cross-reactivity: With 19mer in human FGG mRNA, with 17mer/19mer in NHP FGG
[0362] Specificity category: For human and NHP: AS2 or better, SS3 or better
[0363] miRNA seeds: AS+SS strand: seed region not conserved in human, mouse, and rat and not present in >4 species
[0364] Off-target frequency: ≤30 human off-targets matched with 2 mismatches in antisense strand
[0365] SNPs: siRNA target sites do not harbor SNPs with a MAF≥1% (pos. 2-18)

[0366] The siRNA sequences in subset A were selected for more stringent specificity to yield subset B. Subset B includes 318 siRNAs whose base sequences are shown in Table 4.

TABLE 4
Subset B siRNAs

| | Sense | | Antisense | |
|---|---|---|---|---|
| | strand | | strand | |
| siRNA | SEQ ID | Sense strand sequence | SEQ ID | Antisense strand sequence |
| Name | NO: | (5′-3′) | NO: | (5′-3′) |
| siRNA 224 | 224 | CCGGGCACTCAGACATCAT | 1966 | ATGATGTCTGAGTGCCCGG |
| siRNA 233 | 233 | CAGACATCATGAGTTGGTC | 1975 | GACCAACTCATGATGTCTG |
| siRNA 234 | 234 | AGACATCATGAGTTGGTCC | 1976 | GGACCAACTCATGATGTCT |
| siRNA 235 | 235 | GACATCATGAGTTGGTCCT | 1977 | AGGACCAACTCATGATGTC |
| siRNA 248 | 248 | GGTCCTTGCACCCCCGGAA | 1990 | TTCCGGGGGTGCAAGGACC |
| siRNA 249 | 249 | GTCCTTGCACCCCCGGAAT | 1991 | ATTCCGGGGGTGCAAGGAC |
| siRNA 250 | 250 | TCCTTGCACCCCCGGAATT | 1992 | AATTCCGGGGGTGCAAGGA |
| siRNA 251 | 251 | CCTTGCACCCCCGGAATTT | 1993 | AAATTCCGGGGGTGCAAGG |
| siRNA 253 | 253 | TTGCACCCCCGGAATTTAA | 1995 | TTAAATTCCGGGGGTGCAA |
| siRNA 254 | 254 | TGCACCCCCGGAATTTAAT | 1996 | ATTAAATTCCGGGGGTGCA |
| siRNA 255 | 255 | GCACCCCCGGAATTTAATT | 1997 | AATTAAATTCCGGGGGTGC |
| siRNA 258 | 258 | CCCCCGGAATTTAATTCTC | 2000 | GAGAATTAAATTCCGGGGG |
| siRNA 260 | 260 | CCCGGAATTTAATTCTCTA | 2002 | TAGAGAATTAAATTCCGGG |
| siRNA 261 | 261 | CCGGAATTTAATTCTCTAC | 2003 | GTAGAGAATTAAATTCCGG |
| siRNA 262 | 262 | CGGAATTTAATTCTCTACT | 2004 | AGTAGAGAATTAAATTCCG |
| siRNA 269 | 269 | TAATTCTCTACTTCTATGC | 2011 | GCATAGAAGTAGAGAATTA |
| siRNA 273 | 273 | TCTCTACTTCTATGCTCTT | 2015 | AAGAGCATAGAAGTAGAGA |
| siRNA 274 | 274 | CTCTACTTCTATGCTCTTT | 2016 | AAAGAGCATAGAAGTAGAG |
| siRNA 275 | 275 | TCTACTTCTATGCTCTTTT | 2017 | AAAAGAGCATAGAAGTAGA |
| siRNA 297 | 297 | TCTCTCTTCAACATGTGTA | 2039 | TACACATGTTGAAGAGAGA |
| siRNA 310 | 310 | TGTGTAGCATATGTTGCTA | 2052 | TAGCAACATATGCTACACA |
| siRNA 311 | 311 | GTGTAGCATATGTTGCTAC | 2053 | GTAGCAACATATGCTACAC |
| siRNA 319 | 319 | TATGTTGCTACCAGAGACA | 2061 | TGTCTCTGGTAGCAACATA |
| siRNA 322 | 322 | GTTGCTACCAGAGACAACT | 2064 | AGTTGTCTCTGGTAGCAAC |
| siRNA 323 | 323 | TTGCTACCAGAGACAACTG | 2065 | CAGTTGTCTCTGGTAGCAA |
| siRNA 324 | 324 | TGCTACCAGAGACAACTGC | 2066 | GCAGTIGTCTCTGGTAGCA |
| siRNA 329 | 329 | CCAGAGACAACTGCTGCAT | 2071 | ATGCAGCAGTTGTCTCTGG |
| siRNA 335 | 335 | ACAACTGCTGCATCTTAGA | 2077 | TCTAAGATGCAGCAGTTGT |
| siRNA 342 | 342 | CTGCATCTTAGATGAAAGA | 2084 | TCTTTCATCTAAGATGCAG |
| siRNA 343 | 343 | TGCATCTTAGATGAAAGAT | 2085 | ATCTTTCATCTAAGATGCA |
| siRNA 344 | 344 | GCATCTTAGATGAAAGATT | 2086 | AATCTTTCATCTAAGATGC |
| siRNA 347 | 347 | TCTTAGATGAAAGATTCGG | 2089 | CCGAATCTTTCATCTAAGA |
| siRNA 348 | 348 | CTTAGATGAAAGATTCGGT | 2090 | ACCGAATCTTTCATCTAAG |
| siRNA 349 | 349 | TTAGATGAAAGATTCGGTA | 2091 | TACCGAATCTTTCATCTAA |
| siRNA 350 | 350 | TAGATGAAAGATTCGGTAG | 2092 | CTACCGAATCTTTCATCTA |
| siRNA 351 | 351 | AGATGAAAGATTCGGTAGT | 2093 | ACTACCGAATCTTTCATCT |
| siRNA 352 | 352 | GATGAAAGATTCGGTAGTT | 2094 | AACTACCGAATCTTTCATC |
| siRNA 354 | 354 | TGAAAGATTCGGTAGTTAT | 2096 | ATAACTACCGAATCTTTCA |
| siRNA 355 | 355 | GAAAGATTCGGTAGTTATT | 2097 | AATAACTACCGAATCTTTC |
| siRNA 359 | 359 | GATTCGGTAGTTATTGTCC | 2101 | GGACAATAACTACCGAATC |
| siRNA 361 | 361 | TTCGGTAGTTATTGTCCAA | 2103 | TTGGACAATAACTACCGAA |
| siRNA 362 | 362 | TCGGTAGTTATTGTCCAAC | 2104 | GTTGGACAATAACTACCGA |
| siRNA 363 | 363 | CGGTAGTTATTGTCCAACT | 2105 | AGTTGGACAATAACTACCG |
| siRNA 364 | 364 | GGTAGTTATTGTCCAACTA | 2106 | TAGTTGGACAATAACTACC |
| siRNA 365 | 365 | GTAGTTATTGTCCAACTAC | 2107 | GTAGTTGGACAATAACTAC |
| siRNA 366 | 366 | TAGTTATTGTCCAACTACC | 2108 | GGTAGTTGGACAATAACTA |
| siRNA 367 | 367 | AGTTATTGTCCAACTACCT | 2109 | AGGTAGTTGGACAATAACT |
| siRNA 369 | 369 | TTATTGTCCAACTACCTGT | 2111 | ACAGGTAGTTGGACAATAA |
| siRNA 372 | 372 | TTGTCCAACTACCTGTGGC | 2114 | GCCACAGGTAGTTGGACAA |
| siRNA 373 | 373 | TGTCCAACTACCTGTGGCA | 2115 | TGCCACAGGTAGTTGGACA |
| siRNA 384 | 384 | CTGTGGCATTGCAGATTTC | 2126 | GAAATCTGCAATGCCACAG |
| siRNA 386 | 386 | GTGGCATTGCAGATTTCCT | 2128 | AGGAAATCTGCAATGCCAC |
| siRNA 392 | 392 | TTGCAGATTTCCTGTCTAC | 2134 | GTAGACAGGAAATCTGCAA |
| siRNA 397 | 397 | GATTTCCTGTCTACTTATC | 2139 | GATAAGTAGACAGGAAATC |
| siRNA 398 | 398 | ATTTCCTGTCTACTTATCA | 2140 | TGATAAGTAGACAGGAAAT |
| siRNA 399 | 399 | TTTCCTGTCTACTTATCAA | 2141 | TTGATAAGTAGACAGGAAA |
| siRNA 406 | 406 | TCTACTTATCAAACCAAAG | 2148 | CTTTGGTTTGATAAGTAGA |
| siRNA 411 | 411 | TTATCAAACCAAAGTAGAC | 2153 | GTCTACTTTGGTTTGATAA |
| siRNA 412 | 412 | TATCAAACCAAAGTAGACA | 2154 | TGTCTACTTTGGTTTGATA |
| siRNA 423 | 423 | AGTAGACAAGGATCTACAG | 2165 | CTGTAGATCCTTGTCTACT |
| siRNA 426 | 426 | AGACAAGGATCTACAGTCT | 2168 | AGACTGTAGATCCTTGTCT |
| siRNA 432 | 432 | GGATCTACAGTCTTTGGAA | 2174 | TTCCAAAGACTGTAGATCC |
| siRNA 434 | 434 | ATCTACAGTCTTTGGAAGA | 2176 | TCTTCCAAAGACTGTAGAT |
| siRNA 437 | 437 | TACAGTCTTTGGAAGACAT | 2179 | ATGTCTTCCAAAGACTGTA |
| siRNA 447 | 447 | GGAAGACATCTTACATCAA | 2189 | TTGATGTAAGATGTCTTCC |
| siRNA 449 | 449 | AAGACATCTTACATCAAGT | 2191 | ACTTGATGTAAGATGTCTT |
| siRNA 450 | 450 | AGACATCTTACATCAAGTT | 2192 | AACTTGATGTAAGATGTCT |
| siRNA 493 | 493 | CAGCTGATAAAAGCAATCC | 2235 | GGATTGCTTTTATCAGCTG |
| siRNA 494 | 494 | AGCTGATAAAAGCAATCCA | 2236 | TGGATTGCTTTTATCAGCT |
| siRNA 497 | 497 | TGATAAAAGCAATCCAACT | 2239 | AGTTGGATTGCTTTTATCA |
| siRNA 504 | 504 | AGCAATCCAACTCACTTAT | 2246 | ATAAGTGAGTTGGATTGCT |
| siRNA 505 | 505 | GCAATCCAACTCACTTATA | 2247 | TATAAGTGAGTTGGATTGC |
| siRNA 507 | 507 | AATCCAACTCACTTATAAT | 2249 | ATTATAAGTGAGTTGGATT |
| siRNA 508 | 508 | ATCCAACTCACTTATAATC | 2250 | GATTATAAGTGAGTTGGAT |
| siRNA 509 | 509 | TCCAACTCACTTATAATCC | 2251 | GGATTATAAGTGAGTTGGA |
| siRNA 510 | 510 | CCAACTCACTTATAATCCT | 2252 | AGGATTATAAGTGAGTTGG |
| siRNA 511 | 511 | CAACTCACTTATAATCCTG | 2253 | CAGGATTATAAGTGAGTTG |
| siRNA 514 | 514 | CTCACTTATAATCCTGATG | 2256 | CATCAGGATTATAAGTGAG |
| siRNA 515 | 515 | TCACTTATAATCCTGATGA | 2257 | TCATCAGGATTATAAGTGA |
| siRNA 522 | 522 | TAATCCTGATGAATCATCA | 2264 | TGATGATTCATCAGGATTA |
| siRNA 523 | 523 | AATCCTGATGAATCATCAA | 2265 | TTGATGATTCATCAGGATT |
| siRNA 528 | 528 | TGATGAATCATCAAAACCA | 2270 | TGGTTTTGATGATTCATCA |
| siRNA 539 | 539 | CAAAACCAAATATGATAGA | 2281 | TCTATCATATTTGGTTTTG |
| siRNA 541 | 541 | AAACCAAATATGATAGACG | 2283 | CGTCTATCATATTTGGTTT |
| siRNA 544 | 544 | CCAAATATGATAGACGCTG | 2286 | CAGCGTCTATCATATTTGG |
| siRNA 546 | 546 | AAATATGATAGACGCTGCT | 2288 | AGCAGCGTCTATCATATTT |
| siRNA 548 | 548 | ATATGATAGACGCTGCTAC | 2290 | GTAGCAGCGTCTATCATAT |
| siRNA 554 | 554 | TAGACGCTGCTACTTTGAA | 2296 | TTCAAAGTAGCAGCGTCTA |
| siRNA 556 | 556 | GACGCTGCTACTTTGAAGT | 2298 | ACTTCAAAGTAGCAGCGTC |
| siRNA 573 | 573 | GTCCAGGAAAATGTTAGAA | 2315 | TTCTAACATTTTCCTGGAC |
| siRNA 599 | 599 | TGAAATATGAAGCATCGAT | 2341 | ATCGATGCTTCATATTTCA |
| siRNA 600 | 600 | GAAATATGAAGCATCGATT | 2342 | AATCGATGCTTCATATTTC |
| siRNA 601 | 601 | AAATATGAAGCATCGATTT | 2343 | AAATCGATGCTTCATATTT |
| siRNA 604 | 604 | TATGAAGCATCGATTTTAA | 2346 | TTAAAATCGATGCTTCATA |
| siRNA 606 | 606 | TGAAGCATCGATTTTAACA | 2348 | TGTTAAAATCGATGCTTCA |
| siRNA 607 | 607 | GAAGCATCGATTTTAACAC | 2349 | GTGTTAAAATCGATGCTTC |
| siRNA 608 | 608 | AAGCATCGATTTTAACACA | 2350 | TGTGTTAAAATCGATGCTT |
| siRNA 609 | 609 | AGCATCGATTTTAACACAT | 2351 | ATGTGTTAAAATCGATGCT |
| siRNA 619 | 619 | TTAACACATGACTCAAGTA | 2361 | TACTTGAGTCATGTGTTAA |
| siRNA 624 | 624 | ACATGACTCAAGTATTCGA | 2366 | TCGAATACTTGAGTCATGT |
| siRNA 625 | 625 | CATGACTCAAGTATTCGAT | 2367 | ATCGAATACTTGAGTCATG |
| siRNA 633 | 633 | AAGTATTCGATATTTGCAG | 2375 | CTGCAAATATCGAATACTT |
| siRNA 634 | 634 | AGTATTCGATATTTGCAGG | 2376 | CCTGCAAATATCGAATACT |
| siRNA 689 | 689 | TGAAAGAGAAGGTAGCCCA | 2431 | TGGGCTACCTTCTCTTTCA |
| siRNA 691 | 691 | AAAGAGAAGGTAGCCCAGC | 2433 | GCTGGGCTACCTTCTCTTT |
| siRNA 709 | 709 | CTTGAAGCACAGTGCCAGG | 2451 | CCTGGCACTGTGCTTCAAG |
| siRNA 716 | 716 | CACAGTGCCAGGAACCTTG | 2458 | CAAGGTTCCTGGCACTGTG |
| siRNA 720 | 720 | GTGCCAGGAACCTTGCAAA | 2462 | TTTGCAAGGTTCCTGGCAC |
| siRNA 724 | 724 | CAGGAACCTTGCAAAGACA | 2466 | TGTCTTTGCAAGGTTCCTG |
| siRNA 728 | 728 | AACCTTGCAAAGACACGGT | 2470 | ACCGTGTCTTTGCAAGGTT |
| siRNA 729 | 729 | ACCTTGCAAAGACACGGTG | 2471 | CACCGTGTCTTTGCAAGGT |
| siRNA 730 | 730 | CCTTGCAAAGACACGGTGC | 2472 | GCACCGTGTCTTTGCAAGG |
| siRNA 731 | 731 | CTTGCAAAGACACGGTGCA | 2473 | TGCACCGTGTCTTTGCAAG |
| siRNA 732 | 732 | TTGCAAAGACACGGTGCAA | 2474 | TTGCACCGTGTCTTTGCAA |
| siRNA 733 | 733 | TGCAAAGACACGGTGCAAA | 2475 | TTTGCACCGTGTCTTTGCA |
| siRNA 734 | 734 | GCAAAGACACGGTGCAAAT | 2476 | ATTTGCACCGTGTCTTTGC |
| siRNA 736 | 736 | AAAGACACGGTGCAAATCC | 2478 | GGATTTGCACCGTGTCTTT |
| siRNA 748 | 748 | CAAATCCATGATATCACTG | 2490 | CAGTGATATCATGGATTTG |
| siRNA 749 | 749 | AAATCCATGATATCACTGG | 2491 | CCAGTGATATCATGGATTT |
| siRNA 751 | 751 | ATCCATGATATCACTGGGA | 2493 | TCCCAGTGATATCATGGAT |
| siRNA 752 | 752 | TCCATGATATCACTGGGAA | 2494 | TTCCCAGTGATATCATGGA |
| siRNA 753 | 753 | CCATGATATCACTGGGAAA | 2495 | TTTCCCAGTGATATCATGG |
| siRNA 770 | 770 | AAGATTGTCAAGACATTGC | 2512 | GCAATGTCTTGACAATCTT |
| siRNA 778 | 778 | CAAGACATTGCCAATAAGG | 2520 | CCTTATTGGCAATGTCTTG |
| siRNA 780 | 780 | AGACATTGCCAATAAGGGA | 2522 | TCCCTTATTGGCAATGTCT |
| siRNA 783 | 783 | CATTGCCAATAAGGGAGCT | 2525 | AGCTCCCTTATTGGCAATG |
| siRNA 784 | 784 | ATTGCCAATAAGGGAGCTA | 2526 | TAGCTCCCTTATTGGCAAT |
| siRNA 785 | 785 | TTGCCAATAAGGGAGCTAA | 2527 | TTAGCTCCCTTATTGGCAA |
| siRNA 786 | 786 | TGCCAATAAGGGAGCTAAA | 2528 | TTTAGCTCCCTTATTGGCA |
| siRNA 791 | 791 | ATAAGGGAGCTAAACAGAG | 2533 | CTCTGTTTAGCTCCCTTAT |
| siRNA 794 | 794 | AGGGAGCTAAACAGAGCGG | 2536 | CCGCTCTGTTTAGCTCCCT |
| siRNA 795 | 795 | GGGAGCTAAACAGAGCGGG | 2537 | CCCGCTCTGTTTAGCTCCC |
| siRNA 796 | 796 | GGAGCTAAACAGAGCGGGC | 2538 | GCCCGCTCTGTTTAGCTCC |
| siRNA 797 | 797 | GAGCTAAACAGAGCGGGCT | 2539 | AGCCCGCTCTGTTTAGCTC |
| siRNA 800 | 800 | CTAAACAGAGCGGGCTTTA | 2542 | TAAAGCCCGCTCTGTTTAG |
| siRNA 802 | 802 | AAACAGAGCGGGCTTTACT | 2544 | AGTAAAGCCCGCTCTGTTT |
| siRNA 805 | 805 | CAGAGCGGGCTTTACTTTA | 2547 | TAAAGTAAAGCCCGCTCTG |
| siRNA 806 | 806 | AGAGCGGGCTTTACTTTAT | 2548 | ATAAAGTAAAGCCCGCTCT |
| siRNA 812 | 812 | GGCTTTACTTTATTAAACC | 2554 | GGTTTAATAAAGTAAAGCC |
| siRNA 821 | 821 | TTATTAAACCTCTGAAAGC | 2563 | GCTTTCAGAGGTTTAATAA |
| siRNA 822 | 822 | TATTAAACCTCTGAAAGCT | 2564 | AGCTTTCAGAGGTTTAATA |
| siRNA 825 | 825 | TAAACCTCTGAAAGCTAAC | 2567 | GTTAGCTTTCAGAGGTTTA |
| siRNA 826 | 826 | AAACCTCTGAAAGCTAACC | 2568 | GGTTAGCTTTCAGAGGTTT |
| siRNA 827 | 827 | AACCTCTGAAAGCTAACCA | 2569 | TGGTTAGCTTTCAGAGGTT |
| siRNA 828 | 828 | ACCTCTGAAAGCTAACCAG | 2570 | CTGGTTAGCTTTCAGAGGT |
| siRNA 833 | 833 | TGAAAGCTAACCAGCAATT | 2575 | AATTGCTGGTTAGCTTTCA |
| siRNA 841 | 841 | AACCAGCAATTCTTAGTCT | 2583 | AGACTAAGAATTGCTGGTT |
| siRNA 844 | 844 | CAGCAATTCTTAGTCTACT | 2586 | AGTAGACTAAGAATTGCTG |
| siRNA 850 | 850 | TTCTTAGTCTACTGTGAAA | 2592 | TTTCACAGTAGACTAAGAA |
| siRNA 860 | 860 | ACTGTGAAATCGATGGGTC | 2602 | GACCCATCGATTTCACAGT |
| siRNA 861 | 861 | CTGTGAAATCGATGGGTCT | 2603 | AGACCCATCGATTTCACAG |
| siRNA 865 | 865 | GAAATCGATGGGTCTGGAA | 2607 | TTCCAGACCCATCGATTTC |
| siRNA 866 | 866 | AAATCGATGGGTCTGGAAA | 2608 | TTTCCAGACCCATCGATTT |
| siRNA 877 | 877 | TCTGGAAATGGATGGACTG | 2619 | CAGTCCATCCATTTCCAGA |
| siRNA 893 | 893 | CTGTGTTTCAGAAGAGACT | 2635 | AGTCTCTTCTGAAACACAG |
| siRNA 894 | 894 | TGTGTTTCAGAAGAGACTT | 2636 | AAGTCTCTTCTGAAACACA |
| siRNA 904 | 904 | AAGAGACTTGATGGCAGTG | 2646 | CACTGCCATCAAGTCTCTT |
| siRNA 916 | 916 | GGCAGTGTAGATTTCAAGA | 2658 | TCTTGAAATCTACACTGCC |
| siRNA 929 | 929 | TCAAGAAAAACTGGATTCA | 2671 | TGAATCCAGTTTTTCTTGA |
| siRNA 932 | 932 | AGAAAAACTGGATTCAATA | 2674 | TATTGAATCCAGTTTTTCT |
| siRNA 955 | 955 | GAAGGATTTGGACATCTGT | 2697 | ACAGATGTCCAAATCCTTC |
| siRNA 956 | 956 | AAGGATTTGGACATCTGTC | 2698 | GACAGATGTCCAAATCCTT |
| siRNA 963 | 963 | TGGACATCTGTCTCCTACT | 2705 | AGTAGGAGACAGATGTCCA |
| siRNA 964 | 964 | GGACATCTGTCTCCTACTG | 2706 | CAGTAGGAGACAGATGTCC |
| siRNA 966 | 966 | ACATCTGTCTCCTACTGGC | 2708 | GCCAGTAGGAGACAGATGT |
| siRNA 969 | 969 | TCTGTCTCCTACTGGCACA | 2711 | TGTGCCAGTAGGAGACAGA |
| siRNA 972 | 972 | GTCTCCTACTGGCACAACA | 2714 | TGTTGTGCCAGTAGGAGAC |
| siRNA 973 | 973 | TCTCCTACTGGCACAACAG | 2715 | CTGTTGTGCCAGTAGGAGA |
| siRNA 983 | 983 | GCACAACAGAATTTTGGCT | 2725 | AGCCAAAATTCTGTIGTGC |
| siRNA 1003 | 1003 | GGAAATGAGAAGATTCATT | 2745 | AATGAATCTTCTCATTTCC |
| siRNA 1011 | 1011 | GAAGATTCATTTGATAAGC | 2753 | GCTTATCAAATGAATCTTC |
| siRNA 1013 | 1013 | AGATTCATTTGATAAGCAC | 2755 | GTGCTTATCAAATGAATCT |
| siRNA 1022 | 1022 | TGATAAGCACACAGTCTGC | 2764 | GCAGACTGTGTGCTTATCA |
| siRNA 1024 | 1024 | ATAAGCACACAGTCTGCCA | 2766 | TGGCAGACTGTGTGCTTAT |
| siRNA 1025 | 1025 | TAAGCACACAGTCTGCCAT | 2767 | ATGGCAGACTGTGTGCTTA |
| siRNA 1027 | 1027 | AGCACACAGTCTGCCATCC | 2769 | GGATGGCAGACTGTGTGCT |
| siRNA 1041 | 1041 | CATCCCATATGCATTAAGA | 2783 | TCTTAATGCATATGGGATG |
| siRNA 1046 | 1046 | CATATGCATTAAGAGTGGA | 2788 | TCCACTCTTAATGCATATG |
| siRNA 1047 | 1047 | ATATGCATTAAGAGTGGAA | 2789 | TTCCACTCTTAATGCATAT |
| siRNA 1052 | 1052 | CATTAAGAGTGGAACTGGA | 2794 | TCCAGTTCCACTCTTAATG |
| siRNA 1060 | 1060 | GTGGAACTGGAAGACTGGA | 2802 | TCCAGTCTTCCAGTTCCAC |
| siRNA 1071 | 1071 | AGACTGGAATGGCAGAACC | 2813 | GGTTCTGCCATTCCAGTCT |
| siRNA 1079 | 1079 | ATGGCAGAACCAGTACTGC | 2821 | GCAGTACTGGTTCTGCCAT |
| siRNA 1085 | 1085 | GAACCAGTACTGCAGACTA | 2827 | TAGTCTGCAGTACTGGTTC |
| siRNA 1088 | 1088 | CCAGTACTGCAGACTATGC | 2830 | GCATAGTCTGCAGTACTGG |
| siRNA 1089 | 1089 | CAGTACTGCAGACTATGCC | 2831 | GGCATAGTCTGCAGTACTG |
| siRNA 1091 | 1091 | GTACTGCAGACTATGCCAT | 2833 | ATGGCATAGTCTGCAGTAC |
| siRNA 1095 | 1095 | TGCAGACTATGCCATGTTC | 2837 | GAACATGGCATAGTCTGCA |
| siRNA 1110 | 1110 | GTTCAAGGTGGGACCTGAA | 2852 | TTCAGGTCCCACCTTGAAC |
| siRNA 1111 | 1111 | TTCAAGGTGGGACCTGAAG | 2853 | CTTCAGGTCCCACCTTGAA |
| siRNA 1120 | 1120 | GGACCTGAAGCTGACAAGT | 2862 | ACTTGTCAGCTTCAGGTCC |
| siRNA 1123 | 1123 | CCTGAAGCTGACAAGTACC | 2865 | GGTACTTGTCAGCTTCAGG |
| siRNA 1126 | 1126 | GAAGCTGACAAGTACCGCC | 2868 | GGCGGTACTTGTCAGCTTC |
| siRNA 1127 | 1127 | AAGCTGACAAGTACCGCCT | 2869 | AGGCGGTACTTGTCAGCTT |
| siRNA 1128 | 1128 | AGCTGACAAGTACCGCCTA | 2870 | TAGGCGGTACTTGTCAGCT |
| siRNA 1129 | 1129 | GCTGACAAGTACCGCCTAA | 2871 | TTAGGCGGTACTTGTCAGC |
| siRNA 1130 | 1130 | CTGACAAGTACCGCCTAAC | 2872 | GTTAGGCGGTACTTGTCAG |
| siRNA 1131 | 1131 | TGACAAGTACCGCCTAACA | 2873 | TGTTAGGCGGTACTTGTCA |
| siRNA 1132 | 1132 | GACAAGTACCGCCTAACAT | 2874 | ATGTTAGGCGGTACTTGTC |
| siRNA 1133 | 1133 | ACAAGTACCGCCTAACATA | 2875 | TATGTTAGGCGGTACTTGT |
| siRNA 1134 | 1134 | CAAGTACCGCCTAACATAT | 2876 | ATATGTTAGGCGGTACTTG |
| siRNA 1135 | 1135 | AAGTACCGCCTAACATATG | 2877 | CATATGTTAGGCGGTACTT |
| siRNA 1136 | 1136 | AGTACCGCCTAACATATGC | 2878 | GCATATGTTAGGCGGTACT |
| siRNA 1137 | 1137 | GTACCGCCTAACATATGCC | 2879 | GGCATATGTTAGGCGGTAC |
| siRNA 1138 | 1138 | TACCGCCTAACATATGCCT | 2880 | AGGCATATGTTAGGCGGTA |
| siRNA 1139 | 1139 | ACCGCCTAACATATGCCTA | 2881 | TAGGCATATGTTAGGCGGT |
| siRNA 1140 | 1140 | CCGCCTAACATATGCCTAC | 2882 | GTAGGCATATGTTAGGCGG |
| siRNA 1141 | 1141 | CGCCTAACATATGCCTACT | 2883 | AGTAGGCATATGTTAGGCG |
| siRNA 1143 | 1143 | CCTAACATATGCCTACTTC | 2885 | GAAGTAGGCATATGTTAGG |
| siRNA 1146 | 1146 | AACATATGCCTACTTCGCT | 2888 | AGCGAAGTAGGCATATGTT |
| siRNA 1147 | 1147 | ACATATGCCTACTTCGCTG | 2889 | CAGCGAAGTAGGCATATGT |
| siRNA 1148 | 1148 | CATATGCCTACTTCGCTGG | 2890 | CCAGCGAAGTAGGCATATG |
| siRNA 1149 | 1149 | ATATGCCTACTTCGCTGGT | 2891 | ACCAGCGAAGTAGGCATAT |
| siRNA 1151 | 1151 | ATGCCTACTTCGCTGGTGG | 2893 | CCACCAGCGAAGTAGGCAT |
| siRNA 1174 | 1174 | GCTGGAGATGCCTTTGATG | 2916 | CATCAAAGGCATCTCCAGC |
| siRNA 1178 | 1178 | GAGATGCCTTTGATGGCTT | 2920 | AAGCCATCAAAGGCATCTC |
| siRNA 1182 | 1182 | TGCCTTTGATGGCTTTGAT | 2924 | ATCAAAGCCATCAAAGGCA |
| siRNA 1197 | 1197 | TGATTTTGGCGATGATCCT | 2939 | AGGATCATCGCCAAAATCA |
| siRNA 1198 | 1198 | GATTTTGGCGATGATCCTA | 2940 | TAGGATCATCGCCAAAATC |
| siRNA 1203 | 1203 | TGGCGATGATCCTAGTGAC | 2945 | GTCACTAGGATCATCGCCA |
| siRNA 1205 | 1205 | GCGATGATCCTAGTGACAA | 2947 | TTGTCACTAGGATCATCGC |
| siRNA 1206 | 1206 | CGATGATCCTAGTGACAAG | 2948 | CTTGTCACTAGGATCATCG |
| siRNA 1215 | 1215 | TAGTGACAAGTTTTTCACA | 2957 | TGTGAAAAACTTGTCACTA |
| siRNA 1227 | 1227 | TTTCACATCCCATAATGGC | 2969 | GCCATTATGGGATGTGAAA |
| siRNA 1236 | 1236 | CCATAATGGCATGCAGTTC | 2978 | GAACTGCATGCCATTATGG |
| siRNA 1242 | 1242 | TGGCATGCAGTTCAGTACC | 2984 | GGTACTGAACTGCATGCCA |
| siRNA 1243 | 1243 | GGCATGCAGTTCAGTACCT | 2985 | AGGTACTGAACTGCATGCC |
| siRNA 1248 | 1248 | GCAGTTCAGTACCTGGGAC | 2990 | GTCCCAGGTACTGAACTGC |
| siRNA 1249 | 1249 | CAGTTCAGTACCTGGGACA | 2991 | TGTCCCAGGTACTGAACTG |
| siRNA 1264 | 1264 | GACAATGACAATGATAAGT | 3006 | ACTTATCATTGTCATTGTC |
| siRNA 1265 | 1265 | ACAATGACAATGATAAGTT | 3007 | AACTTATCATTGTCATTGT |
| siRNA 1278 | 1278 | TAAGTTTGAAGGCAACTGT | 3020 | ACAGTTGCCTTCAAACTTA |
| siRNA 1286 | 1286 | AAGGCAACTGTGCTGAACA | 3028 | TGTTCAGCACAGTTGCCTT |
| siRNA 1287 | 1287 | AGGCAACTGTGCTGAACAG | 3029 | CTGTTCAGCACAGTTGCCT |
| siRNA 1298 | 1298 | CTGAACAGGATGGATCTGG | 3040 | CCAGATCCATCCTGTTCAG |
| siRNA 1304 | 1304 | AGGATGGATCTGGTTGGTG | 3046 | CACCAACCAGATCCATCCT |
| siRNA 1311 | 1311 | ATCTGGTTGGTGGATGAAC | 3053 | GTTCATCCACCAACCAGAT |
| siRNA 1315 | 1315 | GGTTGGTGGATGAACAAGT | 3057 | ACTTGTTCATCCACCAACC |
| siRNA 1319 | 1319 | GGTGGATGAACAAGTGTCA | 3061 | TGACACTTGTTCATCCACC |
| siRNA 1320 | 1320 | GTGGATGAACAAGTGTCAC | 3062 | GTGACACTTGTTCATCCAC |
| siRNA 1323 | 1323 | GATGAACAAGTGTCACGCT | 3065 | AGCGTGACACTTGTTCATC |
| siRNA 1324 | 1324 | ATGAACAAGTGTCACGCTG | 3066 | CAGCGTGACACTTGTTCAT |
| siRNA 1325 | 1325 | TGAACAAGTGTCACGCTGG | 3067 | CCAGCGTGACACTTGTTCA |
| siRNA 1326 | 1326 | GAACAAGTGTCACGCTGGC | 3068 | GCCAGCGTGACACTTGTTC |
| siRNA 1339 | 1339 | GCTGGCCATCTCAATGGAG | 3081 | CTCCATTGAGATGGCCAGC |
| siRNA 1342 | 1342 | GGCCATCTCAATGGAGTTT | 3084 | AAACTCCATTGAGATGGCC |
| siRNA 1344 | 1344 | CCATCTCAATGGAGTTTAT | 3086 | ATAAACTCCATTGAGATGG |
| siRNA 1348 | 1348 | CTCAATGGAGTTTATTACC | 3090 | GGTAATAAACTCCATTGAG |
| siRNA 1349 | 1349 | TCAATGGAGTTTATTACCA | 3091 | TGGTAATAAACTCCATTGA |
| siRNA 1354 | 1354 | GGAGTTTATTACCAAGGTG | 3096 | CACCTTGGTAATAAACTCC |
| siRNA 1356 | 1356 | AGTTTATTACCAAGGTGGC | 3098 | GCCACCTTGGTAATAAACT |
| siRNA 1359 | 1359 | TTATTACCAAGGTGGCACT | 3101 | AGTGCCACCTTGGTAATAA |
| siRNA 1362 | 1362 | TTACCAAGGTGGCACTTAC | 3104 | GTAAGTGCCACCTTGGTAA |
| siRNA 1365 | 1365 | CCAAGGTGGCACTTACTCA | 3107 | TGAGTAAGTGCCACCTTGG |
| siRNA 1368 | 1368 | AGGTGGCACTTACTCAAAA | 3110 | TTTTGAGTAAGTGCCACCT |
| siRNA 1374 | 1374 | CACTTACTCAAAAGCATCT | 3116 | AGATGCTTTTGAGTAAGTG |
| siRNA 1383 | 1383 | AAAAGCATCTACTCCTAAT | 3125 | ATTAGGAGTAGATGCTTTT |
| siRNA 1384 | 1384 | AAAGCATCTACTCCTAATG | 3126 | CATTAGGAGTAGATGCTTT |
| siRNA 1385 | 1385 | AAGCATCTACTCCTAATGG | 3127 | CCATTAGGAGTAGATGCTT |
| siRNA 1386 | 1386 | AGCATCTACTCCTAATGGT | 3128 | ACCATTAGGAGTAGATGCT |
| siRNA 1387 | 1387 | GCATCTACTCCTAATGGTT | 3129 | AACCATTAGGAGTAGATGC |
| siRNA 1389 | 1389 | ATCTACTCCTAATGGTTAT | 3131 | ATAACCATTAGGAGTAGAT |
| siRNA 1390 | 1390 | TCTACTCCTAATGGTTATG | 3132 | CATAACCATTAGGAGTAGA |
| siRNA 1391 | 1391 | CTACTCCTAATGGTTATGA | 3133 | TCATAACCATTAGGAGTAG |
| siRNA 1394 | 1394 | CTCCTAATGGTTATGATAA | 3136 | TTATCATAACCATTAGGAG |
| siRNA 1395 | 1395 | TCCTAATGGTTATGATAAT | 3137 | ATTATCATAACCATTAGGA |
| siRNA 1396 | 1396 | CCTAATGGTTATGATAATG | 3138 | CATTATCATAACCATTAGG |
| siRNA 1401 | 1401 | TGGTTATGATAATGGCATT | 3143 | AATGCCATTATCATAACCA |
| siRNA 1404 | 1404 | TTATGATAATGGCATTATT | 3146 | AATAATGCCATTATCATAA |
| siRNA 1409 | 1409 | ATAATGGCATTATTTGGGC | 3151 | GCCCAAATAATGCCATTAT |
| siRNA 1410 | 1410 | TAATGGCATTATTTGGGCC | 3152 | GGCCCAAATAATGCCATTA |
| siRNA 1417 | 1417 | ATTATTTGGGCCACTTGGA | 3159 | TCCAAGTGGCCCAAATAAT |
| siRNA 1418 | 1418 | TTATTTGGGCCACTTGGAA | 3160 | TTCCAAGTGGCCCAAATAA |
| siRNA 1419 | 1419 | TATTTGGGCCACTTGGAAA | 3161 | TTTCCAAGTGGCCCAAATA |
| siRNA 1420 | 1420 | ATTTGGGCCACTTGGAAAA | 3162 | TTTTCCAAGTGGCCCAAAT |
| siRNA 1426 | 1426 | GCCACTTGGAAAACCCGGT | 3168 | ACCGGGTTTTCCAAGTGGC |
| siRNA 1427 | 1427 | CCACTTGGAAAACCCGGTG | 3169 | CACCGGGTTTTCCAAGTGG |
| siRNA 1428 | 1428 | CACTTGGAAAACCCGGTGG | 3170 | CCACCGGGTTTTCCAAGTG |
| siRNA 1431 | 1431 | TTGGAAAACCCGGTGGTAT | 3173 | ATACCACCGGGTTTTCCAA |
| siRNA 1432 | 1432 | TGGAAAACCCGGTGGTATT | 3174 | AATACCACCGGGTTTTCCA |
| siRNA 1434 | 1434 | GAAAACCCGGTGGTATTCC | 3176 | GGAATACCACCGGGTTTTC |
| siRNA 1435 | 1435 | AAAACCCGGTGGTATTCCA | 3177 | TGGAATACCACCGGGTTTT |
| siRNA 1440 | 1440 | CCGGTGGTATTCCATGAAG | 3182 | CTTCATGGAATACCACCGG |
| siRNA 1461 | 1461 | AACCACTATGAAGATAATC | 3203 | GATTATCTTCATAGTGGTT |
| siRNA 1462 | 1462 | ACCACTATGAAGATAATCC | 3204 | GGATTATCTTCATAGTGGT |
| siRNA 1466 | 1466 | CTATGAAGATAATCCCATT | 3208 | AATGGGATTATCTTCATAG |
| siRNA 1467 | 1467 | TATGAAGATAATCCCATTC | 3209 | GAATGGGATTATCTTCATA |
| siRNA 1477 | 1477 | ATCCCATTCAACAGACTCA | 3219 | TGAGTCTGTTGAATGGGAT |
| siRNA 1478 | 1478 | TCCCATTCAACAGACTCAC | 3220 | GTGAGTCTGTTGAATGGGA |
| siRNA 1482 | 1482 | ATTCAACAGACTCACAATT | 3224 | AATTGTGAGTCTGTTGAAT |
| siRNA 1485 | 1485 | CAACAGACTCACAATTGGA | 3227 | TCCAATTGTGAGTCTGTTG |
| siRNA 1487 | 1487 | ACAGACTCACAATTGGAGA | 3229 | TCTCCAATTGTGAGTCTGT |
| siRNA 1488 | 1488 | CAGACTCACAATTGGAGAA | 3230 | TTCTCCAATTGTGAGTCTG |
| siRNA 1519 | 1519 | CACCTGGGGGGAGCCAAAC | 3261 | GTTTGGCTCCCCCCAGGTG |
| siRNA 1533 | 1533 | CAAACAGGCTGGAGACGTT | 3275 | AACGTCTCCAGCCTGTTTG |
| siRNA 1540 | 1540 | GCTGGAGACGTTTAAAAGA | 3282 | TCTTTTAAACGTCTCCAGC |
| siRNA 1583 | 1583 | TTAAAGGACTTTATCTGAA | 3325 | TTCAGATAAAGTCCTTTAA |
| siRNA 1588 | 1588 | GGACTTTATCTGAACAGAG | 3330 | CTCTGTTCAGATAAAGTCC |
| siRNA 1592 | 1592 | TTTATCTGAACAGAGAGAT | 3334 | ATCTCTCTGTTCAGATAAA |
| siRNA 1597 | 1597 | CTGAACAGAGAGATATAAT | 3339 | ATTATATCTCTCTGTTCAG |
| siRNA 1615 | 1615 | TATTTTTCCTATTGGACAA | 3357 | TTGTCCAATAGGAAAAATA |
| siRNA 1617 | 1617 | TTTTTCCTATTGGACAATG | 3359 | CATTGTCCAATAGGAAAAA |
| siRNA 1622 | 1622 | CCTATTGGACAATGGACTT | 3364 | AAGTCCATTGTCCAATAGG |
| siRNA 1623 | 1623 | CTATTGGACAATGGACTTG | 3365 | CAAGTCCATTGTCCAATAG |
| siRNA 1626 | 1626 | TTGGACAATGGACTTGCAA | 3368 | TTGCAAGTCCATTGTCCAA |
| siRNA 1627 | 1627 | TGGACAATGGACTTGCAAA | 3369 | TTTGCAAGTCCATTGTCCA |
| siRNA 1647 | 1647 | CTTCACTTCATTTTAAGAG | 3389 | CTCTTAAAATGAAGTGAAG |
| siRNA 1648 | 1648 | TTCACTTCATTTTAAGAGC | 3390 | GCTCTTAAAATGAAGTGAA |
| siRNA 1649 | 1649 | TCACTTCATTTTAAGAGCA | 3391 | TGCTCTTAAAATGAAGTGA |
| siRNA 1664 | 1664 | AGCAAAAGACCCCATGTTG | 3406 | CAACATGGGGTCTTTTGCT |
| siRNA 1672 | 1672 | ACCCCATGTTGAAAACTCC | 3414 | GGAGTTTTCAACATGGGGT |
| siRNA 1678 | 1678 | TGTTGAAAACTCCATAACA | 3420 | TGTTATGGAGTTTTCAACA |
| siRNA 1679 | 1679 | GTTGAAAACTCCATAACAG | 3421 | CTGTTATGGAGTTTTCAAC |
| siRNA 1680 | 1680 | TTGAAAACTCCATAACAGT | 3422 | ACTGTTATGGAGTTTTCAA |
| siRNA 1691 | 1691 | ATAACAGTTTTATGCTGAT | 3433 | ATCAGCATAAAACTGTTAT |
| siRNA 1696 | 1696 | AGTTTTATGCTGATGATAA | 3438 | TTATCATCAGCATAAAACT |
| siRNA 1700 | 1700 | TTATGCTGATGATAATTTA | 3442 | TAAATTATCATCAGCATAA |
| siRNA 1710 | 1710 | GATAATTTATCTACATGCA | 3452 | TGCATGTAGATAAATTATC |

[0367] The siRNAs in subset B were selected to have the following characteristics:
[0368] Cross-reactivity: With 19mer in human FGG mRNA, with 17mer/19mer in NHP FGG
[0369] Specificity category: For human and NHP: AS2 or better, SS3 or better
[0370] miRNA seeds: AS±SS strand: seed region not conserved in human, mouse, and rat and not present in >4 species
[0371] Off-target frequency: ≤20 human off-targets matched with 2 mismatches in antisense strand
[0372] SNPs: siRNA target sites do not harbor SNPs with a MAF≥1% (pos. 2-18)

[0373] The siRNA sequences in subset B were further selected for absence of seed regions in the AS strand that are identical to a seed region of known human miRNA to yield subset C. Subset C includes 221 siRNAs whose base sequences are shown in Table 5.

TABLE 5
Subset C siRNAs

| | Sense | | Antisense | |
|---|---|---|---|---|
| | strand | | strand | |
| | SEQ | Sense strand sequence | SEQ | Antisense strand sequence |
| siRNA Name | ID NO: | (5′-3′) | ID NO: | (5′-3′) |
| siRNA 224 | 224 | CCGGGCACTCAGACATCAT | 1966 | ATGATGTCTGAGTGCCCGG |
| siRNA 233 | 233 | CAGACATCATGAGTTGGTC | 1975 | GACCAACTCATGATGTCTG |
| siRNA 234 | 234 | AGACATCATGAGTTGGTCC | 1976 | GGACCAACTCATGATGTCT |
| siRNA 250 | 250 | TCCTTGCACCCCCGGAATT | 1992 | AATTCCGGGGGTGCAAGGA |
| siRNA 251 | 251 | CCTTGCACCCCCGGAATTT | 1993 | AAATTCCGGGGGTGCAAGG |
| siRNA 253 | 253 | TTGCACCCCCGGAATTTAA | 1995 | TTAAATTCCGGGGGTGCAA |
| siRNA 254 | 254 | TGCACCCCCGGAATTTAAT | 1996 | ATTAAATTCCGGGGGTGCA |
| siRNA 255 | 255 | GCACCCCCGGAATTTAATT | 1997 | AATTAAATTCCGGGGGTGC |
| siRNA 258 | 258 | CCCCCGGAATTTAATTCTC | 2000 | GAGAATTAAATTCCGGGGG |
| siRNA 261 | 261 | CCGGAATTTAATTCTCTAC | 2003 | GTAGAGAATTAAATTCCGG |
| siRNA 269 | 269 | TAATTCTCTACTTCTATGC | 2011 | GCATAGAAGTAGAGAATTA |
| siRNA 274 | 274 | CTCTACTTCTATGCTCTTT | 2016 | AAAGAGCATAGAAGTAGAG |
| siRNA 310 | 310 | TGTGTAGCATATGTTGCTA | 2052 | TAGCAACATATGCTACACA |
| siRNA 323 | 323 | TTGCTACCAGAGACAACTG | 2065 | CAGTTGTCTCTGGTAGCAA |
| siRNA 324 | 324 | TGCTACCAGAGACAACTGC | 2066 | GCAGTTGTCTCTGGTAGCA |
| siRNA 335 | 335 | ACAACTGCTGCATCTTAGA | 2077 | TCTAAGATGCAGCAGTTGT |
| siRNA 342 | 342 | CTGCATCTTAGATGAAAGA | 2084 | TCTTTCATCTAAGATGCAG |
| siRNA 343 | 343 | TGCATCTTAGATGAAAGAT | 2085 | ATCTTTCATCTAAGATGCA |
| siRNA 344 | 344 | GCATCTTAGATGAAAGATT | 2086 | AATCTTTCATCTAAGATGC |
| siRNA 347 | 347 | TCTTAGATGAAAGATTCGG | 2089 | CCGAATCTTTCATCTAAGA |
| siRNA 348 | 348 | CTTAGATGAAAGATTCGGT | 2090 | ACCGAATCTTTCATCTAAG |
| siRNA 349 | 349 | TTAGATGAAAGATTCGGTA | 2091 | TACCGAATCTTTCATCTAA |
| siRNA 350 | 350 | TAGATGAAAGATTCGGTAG | 2092 | CTACCGAATCTTTCATCTA |
| siRNA 351 | 351 | AGATGAAAGATTCGGTAGT | 2093 | ACTACCGAATCTTTCATCT |
| siRNA 352 | 352 | GATGAAAGATTCGGTAGTT | 2094 | AACTACCGAATCTTTCATC |
| siRNA 354 | 354 | TGAAAGATTCGGTAGTTAT | 2096 | ATAACTACCGAATCTTTCA |
| siRNA 355 | 355 | GAAAGATTCGGTAGTTATT | 2097 | AATAACTACCGAATCTTTC |
| siRNA 359 | 359 | GATTCGGTAGTTATTGTCC | 2101 | GGACAATAACTACCGAATC |
| siRNA 363 | 363 | CGGTAGTTATTGTCCAACT | 2105 | AGTTGGACAATAACTACCG |
| siRNA 365 | 365 | GTAGTTATTGTCCAACTAC | 2107 | GTAGTTGGACAATAACTAC |
| siRNA 367 | 367 | AGTTATTGTCCAACTACCT | 2109 | AGGTAGTTGGACAATAACT |
| siRNA 369 | 369 | TTATTGTCCAACTACCTGT | 2111 | ACAGGTAGTTGGACAATAA |
| siRNA 372 | 372 | TTGTCCAACTACCTGTGGC | 2114 | GCCACAGGTAGTTGGACAA |
| siRNA 373 | 373 | TGTCCAACTACCTGTGGCA | 2115 | TGCCACAGGTAGTTGGACA |
| siRNA 384 | 384 | CTGTGGCATTGCAGATTTC | 2126 | GAAATCTGCAATGCCACAG |
| siRNA 392 | 392 | TTGCAGATTTCCTGTCTAC | 2134 | GTAGACAGGAAATCTGCAA |
| siRNA 397 | 397 | GATTTCCTGTCTACTTATC | 2139 | GATAAGTAGACAGGAAATC |
| siRNA 398 | 398 | ATTTCCTGTCTACTTATCA | 2140 | TGATAAGTAGACAGGAAAT |
| siRNA 406 | 406 | TCTACTTATCAAACCAAAG | 2148 | CTTTGGTTTGATAAGTAGA |
| siRNA 411 | 411 | TTATCAAACCAAAGTAGAC | 2153 | GTCTACTTTGGTTTGATAA |
| siRNA 423 | 423 | AGTAGACAAGGATCTACAG | 2165 | CTGTAGATCCTTGTCTACT |
| siRNA 426 | 426 | AGACAAGGATCTACAGTCT | 2168 | AGACTGTAGATCCTTGTCT |
| siRNA 432 | 432 | GGATCTACAGTCTTTGGAA | 2174 | TTCCAAAGACTGTAGATCC |
| siRNA 434 | 434 | ATCTACAGTCTTTGGAAGA | 2176 | TCTTCCAAAGACTGTAGAT |
| siRNA 447 | 447 | GGAAGACATCTTACATCAA | 2189 | TTGATGTAAGATGTCTTCC |
| siRNA 449 | 449 | AAGACATCTTACATCAAGT | 2191 | ACTTGATGTAAGATGTCTT |
| siRNA 450 | 450 | AGACATCTTACATCAAGTT | 2192 | AACTTGATGTAAGATGTCT |
| siRNA 493 | 493 | CAGCTGATAAAAGCAATCC | 2235 | GGATTGCTTTTATCAGCTG |
| siRNA 494 | 494 | AGCTGATAAAAGCAATCCA | 2236 | TGGATTGCTTTTATCAGCT |
| siRNA 497 | 497 | TGATAAAAGCAATCCAACT | 2239 | AGTTGGATTGCTTTTATCA |
| siRNA 504 | 504 | AGCAATCCAACTCACTTAT | 2246 | ATAAGTGAGTTGGATTGCT |
| siRNA 505 | 505 | GCAATCCAACTCACTTATA | 2247 | TATAAGTGAGTTGGATTGC |
| siRNA 507 | 507 | AATCCAACTCACTTATAAT | 2249 | ATTATAAGTGAGTTGGATT |
| siRNA 508 | 508 | ATCCAACTCACTTATAATC | 2250 | GATTATAAGTGAGTTGGAT |
| siRNA 509 | 509 | TCCAACTCACTTATAATCC | 2251 | GGATTATAAGTGAGTTGGA |
| siRNA 510 | 510 | CCAACTCACTTATAATCCT | 2252 | AGGATTATAAGTGAGTTGG |
| siRNA 514 | 514 | CTCACTTATAATCCTGATG | 2256 | CATCAGGATTATAAGTGAG |
| siRNA 515 | 515 | TCACTTATAATCCTGATGA | 2257 | TCATCAGGATTATAAGTGA |
| siRNA 523 | 523 | AATCCTGATGAATCATCAA | 2265 | TTGATGATTCATCAGGATT |
| siRNA 528 | 528 | TGATGAATCATCAAAACCA | 2270 | TGGTTTTGATGATTCATCA |
| siRNA 539 | 539 | CAAAACCAAATATGATAGA | 2281 | TCTATCATATTTGGTTTTG |
| siRNA 544 | 544 | CCAAATATGATAGACGCTG | 2286 | CAGCGTCTATCATATTTGG |
| siRNA 546 | 546 | AAATATGATAGACGCTGCT | 2288 | AGCAGCGTCTATCATATTT |
| siRNA 554 | 554 | TAGACGCTGCTACTTTGAA | 2296 | TTCAAAGTAGCAGCGTCTA |
| siRNA 573 | 573 | GTCCAGGAAAATGTTAGAA | 2315 | TTCTAACATTTTCCTGGAC |
| siRNA 599 | 599 | TGAAATATGAAGCATCGAT | 2341 | ATCGATGCTTCATATTTCA |
| siRNA 600 | 600 | GAAATATGAAGCATCGATT | 2342 | AATCGATGCTTCATATTTC |
| siRNA 601 | 601 | AAATATGAAGCATCGATTT | 2343 | AAATCGATGCTTCATATTT |
| siRNA 604 | 604 | TATGAAGCATCGATTTTAA | 2346 | TTAAAATCGATGCTTCATA |
| siRNA 606 | 606 | TGAAGCATCGATTTTAACA | 2348 | TGTTAAAATCGATGCTTCA |
| siRNA 609 | 609 | AGCATCGATTTTAACACAT | 2351 | ATGTGTTAAAATCGATGCT |
| siRNA 619 | 619 | TTAACACATGACTCAAGTA | 2361 | TACTTGAGTCATGTGTTAA |
| siRNA 624 | 624 | ACATGACTCAAGTATTCGA | 2366 | TCGAATACTTGAGTCATGT |
| siRNA 625 | 625 | CATGACTCAAGTATTCGAT | 2367 | ATCGAATACTTGAGTCATG |
| siRNA 661 | 661 | AATTCAAATAATCAAAAGA | 2403 | TCTTTTGATTATTTGAATT |
| siRNA 716 | 716 | CACAGTGCCAGGAACCTTG | 2458 | CAAGGTTCCTGGCACTGTG |
| siRNA 720 | 720 | GTGCCAGGAACCTTGCAAA | 2462 | TTTGCAAGGTTCCTGGCAC |
| siRNA 728 | 728 | AACCTTGCAAAGACACGGT | 2470 | ACCGTGTCTTTGCAAGGTT |
| siRNA 729 | 729 | ACCTTGCAAAGACACGGTG | 2471 | CACCGTGTCTTTGCAAGGT |
| siRNA 730 | 730 | CCTTGCAAAGACACGGTGC | 2472 | GCACCGTGTCTTTGCAAGG |
| siRNA 731 | 731 | CTTGCAAAGACACGGTGCA | 2473 | TGCACCGTGTCTTTGCAAG |
| siRNA 733 | 733 | TGCAAAGACACGGTGCAAA | 2475 | TTTGCACCGTGTCTTTGCA |
| siRNA 736 | 736 | AAAGACACGGTGCAAATCC | 2478 | GGATTTGCACCGTGTCTTT |
| siRNA 751 | 751 | ATCCATGATATCACTGGGA | 2493 | TCCCAGTGATATCATGGAT |
| siRNA 753 | 753 | CCATGATATCACTGGGAAA | 2495 | TTTCCCAGTGATATCATGG |
| siRNA 770 | 770 | AAGATTGTCAAGACATTGC | 2512 | GCAATGTCTTGACAATCTT |
| siRNA 778 | 778 | CAAGACATTGCCAATAAGG | 2520 | CCTTATTGGCAATGTCTTG |
| siRNA 780 | 780 | AGACATTGCCAATAAGGGA | 2522 | TCCCTTATTGGCAATGTCT |
| siRNA 784 | 784 | ATTGCCAATAAGGGAGCTA | 2526 | TAGCTCCCTTATTGGCAAT |
| siRNA 785 | 785 | TTGCCAATAAGGGAGCTAA | 2527 | TTAGCTCCCTTATTGGCAA |
| siRNA 786 | 786 | TGCCAATAAGGGAGCTAAA | 2528 | TTTAGCTCCCTTATTGGCA |
| siRNA 791 | 791 | ATAAGGGAGCTAAACAGAG | 2533 | CTCTGTTTAGCTCCCTTAT |
| siRNA 795 | 795 | GGGAGCTAAACAGAGCGGG | 2537 | CCCGCTCTGTTTAGCTCCC |
| siRNA 796 | 796 | GGAGCTAAACAGAGCGGGC | 2538 | GCCCGCTCTGTTTAGCTCC |
| siRNA 800 | 800 | CTAAACAGAGCGGGCTTTA | 2542 | TAAAGCCCGCTCTGTTTAG |
| siRNA 802 | 802 | AAACAGAGCGGGCTTTACT | 2544 | AGTAAAGCCCGCTCTGTTT |
| siRNA 806 | 806 | AGAGCGGGCTTTACTTTAT | 2548 | ATAAAGTAAAGCCCGCTCT |
| siRNA 812 | 812 | GGCTTTACTTTATTAAACC | 2554 | GGTTTAATAAAGTAAAGCC |
| siRNA 821 | 821 | TTATTAAACCTCTGAAAGC | 2563 | GCTTTCAGAGGTTTAATAA |
| siRNA 825 | 825 | TAAACCTCTGAAAGCTAAC | 2567 | GTTAGCTTTCAGAGGTTTA |
| siRNA 826 | 826 | AAACCTCTGAAAGCTAACC | 2568 | GGTTAGCTTTCAGAGGTTT |
| siRNA 827 | 827 | AACCTCTGAAAGCTAACCA | 2569 | TGGTTAGCTTTCAGAGGTT |
| siRNA 833 | 833 | TGAAAGCTAACCAGCAATT | 2575 | AATTGCTGGTTAGCTTTCA |
| siRNA 844 | 844 | CAGCAATTCTTAGTCTACT | 2586 | AGTAGACTAAGAATTGCTG |
| siRNA 850 | 850 | TTCTTAGTCTACTGTGAAA | 2592 | TTTCACAGTAGACTAAGAA |
| siRNA 877 | 877 | TCTGGAAATGGATGGACTG | 2619 | CAGTCCATCCATTTCCAGA |
| siRNA 894 | 894 | TGTGTTTCAGAAGAGACTT | 2636 | AAGTCTCTTCTGAAACACA |
| siRNA 904 | 904 | AAGAGACTTGATGGCAGTG | 2646 | CACTGCCATCAAGTCTCTT |
| siRNA 929 | 929 | TCAAGAAAAACTGGATTCA | 2671 | TGAATCCAGTTTTTCTTGA |
| siRNA 932 | 932 | AGAAAAACTGGATTCAATA | 2674 | TATTGAATCCAGTTTTTCT |
| siRNA 964 | 964 | GGACATCTGTCTCCTACTG | 2706 | CAGTAGGAGACAGATGTCC |
| siRNA 972 | 972 | GTCTCCTACTGGCACAACA | 2714 | TGTTGTGCCAGTAGGAGAC |
| siRNA 973 | 973 | TCTCCTACTGGCACAACAG | 2715 | CTGTTGTGCCAGTAGGAGA |
| siRNA 983 | 983 | GCACAACAGAATTTTGGCT | 2725 | AGCCAAAATTCTGTTGTGC |
| siRNA 1003 | 1003 | GGAAATGAGAAGATTCATT | 2745 | AATGAATCTTCTCATTTCC |
| siRNA 1011 | 1011 | GAAGATTCATTTGATAAGC | 2753 | GCTTATCAAATGAATCTTC |
| siRNA 1013 | 1013 | AGATTCATTTGATAAGCAC | 2755 | GTGCTTATCAAATGAATCT |
| siRNA 1024 | 1024 | ATAAGCACACAGTCTGCCA | 2766 | TGGCAGACTGTGTGCTTAT |
| siRNA 1027 | 1027 | AGCACACAGTCTGCCATCC | 2769 | GGATGGCAGACTGTGTGCT |
| siRNA 1041 | 1041 | CATCCCATATGCATTAAGA | 2783 | TCTTAATGCATATGGGATG |
| siRNA 1052 | 1052 | CATTAAGAGTGGAACTGGA | 2794 | TCCAGTTCCACTCTTAATG |
| siRNA 1060 | 1060 | GTGGAACTGGAAGACTGGA | 2802 | TCCAGTCTTCCAGTTCCAC |
| siRNA 1071 | 1071 | AGACTGGAATGGCAGAACC | 2813 | GGTTCTGCCATTCCAGTCT |
| siRNA 1079 | 1079 | ATGGCAGAACCAGTACTGC | 2821 | GCAGTACTGGTTCTGCCAT |
| siRNA 1085 | 1085 | GAACCAGTACTGCAGACTA | 2827 | TAGTCTGCAGTACTGGTTC |
| siRNA 1088 | 1088 | CCAGTACTGCAGACTATGC | 2830 | GCATAGTCTGCAGTACTGG |
| siRNA 1089 | 1089 | CAGTACTGCAGACTATGCC | 2831 | GGCATAGTCTGCAGTACTG |
| siRNA 1095 | 1095 | TGCAGACTATGCCATGTTC | 2837 | GAACATGGCATAGTCTGCA |
| siRNA 1111 | 1111 | TTCAAGGTGGGACCTGAAG | 2853 | CTTCAGGTCCCACCTTGAA |
| siRNA 1123 | 1123 | CCTGAAGCTGACAAGTACC | 2865 | GGTACTTGTCAGCTTCAGG |
| siRNA 1126 | 1126 | GAAGCTGACAAGTACCGCC | 2868 | GGCGGTACTTGTCAGCTTC |
| siRNA 1127 | 1127 | AAGCTGACAAGTACCGCCT | 2869 | AGGCGGTACTTGTCAGCTT |
| siRNA 1128 | 1128 | AGCTGACAAGTACCGCCTA | 2870 | TAGGCGGTACTTGTCAGCT |
| siRNA 1129 | 1129 | GCTGACAAGTACCGCCTAA | 2871 | TTAGGCGGTACTTGTCAGC |
| siRNA 1130 | 1130 | CTGACAAGTACCGCCTAAC | 2872 | GTTAGGCGGTACTTGTCAG |
| siRNA 1132 | 1132 | GACAAGTACCGCCTAACAT | 2874 | ATGTTAGGCGGTACTTGTC |
| siRNA 1133 | 1133 | ACAAGTACCGCCTAACATA | 2875 | TATGTTAGGCGGTACTTGT |
| siRNA 1134 | 1134 | CAAGTACCGCCTAACATAT | 2876 | ATATGTTAGGCGGTACTTG |
| siRNA 1135 | 1135 | AAGTACCGCCTAACATATG | 2877 | CATATGTTAGGCGGTACTT |
| siRNA 1136 | 1136 | AGTACCGCCTAACATATGC | 2878 | GCATATGTTAGGCGGTACT |
| siRNA 1137 | 1137 | GTACCGCCTAACATATGCC | 2879 | GGCATATGTTAGGCGGTAC |
| siRNA 1138 | 1138 | TACCGCCTAACATATGCCT | 2880 | AGGCATATGTTAGGCGGTA |
| siRNA 1139 | 1139 | ACCGCCTAACATATGCCTA | 2881 | TAGGCATATGTTAGGCGGT |
| siRNA 1146 | 1146 | AACATATGCCTACTTCGCT | 2888 | AGCGAAGTAGGCATATGTT |
| siRNA 1147 | 1147 | ACATATGCCTACTTCGCTG | 2889 | CAGCGAAGTAGGCATATGT |
| siRNA 1148 | 1148 | CATATGCCTACTTCGCTGG | 2890 | CCAGCGAAGTAGGCATATG |
| siRNA 1174 | 1174 | GCTGGAGATGCCTTTGATG | 2916 | CATCAAAGGCATCTCCAGC |
| siRNA 1178 | 1178 | GAGATGCCTTTGATGGCTT | 2920 | AAGCCATCAAAGGCATCTC |
| siRNA 1182 | 1182 | TGCCTTTGATGGCTTTGAT | 2924 | ATCAAAGCCATCAAAGGCA |
| siRNA 1197 | 1197 | TGATTTTGGCGATGATCCT | 2939 | AGGATCATCGCCAAAATCA |
| siRNA 1203 | 1203 | TGGCGATGATCCTAGTGAC | 2945 | GTCACTAGGATCATCGCCA |
| siRNA 1205 | 1205 | GCGATGATCCTAGTGACAA | 2947 | TTGTCACTAGGATCATCGC |
| siRNA 1206 | 1206 | CGATGATCCTAGTGACAAG | 2948 | CTTGTCACTAGGATCATCG |
| siRNA 1215 | 1215 | TAGTGACAAGTTTTTCACA | 2957 | TGTGAAAAACTTGTCACTA |
| siRNA 1236 | 1236 | CCATAATGGCATGCAGTTC | 2978 | GAACTGCATGCCATTATGG |
| siRNA 1242 | 1242 | TGGCATGCAGTTCAGTACC | 2984 | GGTACTGAACTGCATGCCA |
| siRNA 1243 | 1243 | GGCATGCAGTTCAGTACCT | 2985 | AGGTACTGAACTGCATGCC |
| siRNA 1264 | 1264 | GACAATGACAATGATAAGT | 3006 | ACTTATCATTGTCATTGTC |
| siRNA 1265 | 1265 | ACAATGACAATGATAAGTT | 3007 | AACTTATCATTGTCATTGT |
| siRNA 1278 | 1278 | TAAGTTTGAAGGCAACTGT | 3020 | ACAGTTGCCTTCAAACTTA |
| siRNA 1286 | 1286 | AAGGCAACTGTGCTGAACA | 3028 | TGTTCAGCACAGTTGCCTT |
| siRNA 1287 | 1287 | AGGCAACTGTGCTGAACAG | 3029 | CTGTTCAGCACAGTTGCCT |
| siRNA 1304 | 1304 | AGGATGGATCTGGTTGGTG | 3046 | CACCAACCAGATCCATCCT |
| siRNA 1311 | 1311 | ATCTGGTTGGTGGATGAAC | 3053 | GTTCATCCACCAACCAGAT |
| siRNA 1315 | 1315 | GGTTGGTGGATGAACAAGT | 3057 | ACTTGTTCATCCACCAACC |
| siRNA 1320 | 1320 | GTGGATGAACAAGTGTCAC | 3062 | GTGACACTTGTTCATCCAC |
| siRNA 1323 | 1323 | GATGAACAAGTGTCACGCT | 3065 | AGCGTGACACTTGTTCATC |
| siRNA 1324 | 1324 | ATGAACAAGTGTCACGCTG | 3066 | CAGCGTGACACTTGTTCAT |
| siRNA 1325 | 1325 | TGAACAAGTGTCACGCTGG | 3067 | CCAGCGTGACACTTGTTCA |
| siRNA 1339 | 1339 | GCTGGCCATCTCAATGGAG | 3081 | CTCCATTGAGATGGCCAGC |
| siRNA 1342 | 1342 | GGCCATCTCAATGGAGTTT | 3084 | AAACTCCATTGAGATGGCC |
| siRNA 1344 | 1344 | CCATCTCAATGGAGTTTAT | 3086 | ATAAACTCCATTGAGATGG |
| siRNA 1348 | 1348 | CTCAATGGAGTTTATTACC | 3090 | GGTAATAAACTCCATTGAG |
| siRNA 1349 | 1349 | TCAATGGAGTTTATTACCA | 3091 | TGGTAATAAACTCCATTGA |
| siRNA 1356 | 1356 | AGTTTATTACCAAGGTGGC | 3098 | GCCACCTTGGTAATAAACT |
| siRNA 1362 | 1362 | TTACCAAGGTGGCACTTAC | 3104 | GTAAGTGCCACCTTGGTAA |
| siRNA 1365 | 1365 | CCAAGGTGGCACTTACTCA | 3107 | TGAGTAAGTGCCACCTTGG |
| siRNA 1374 | 1374 | CACTTACTCAAAAGCATCT | 3116 | AGATGCTTTTGAGTAAGTG |
| siRNA 1384 | 1384 | AAAGCATCTACTCCTAATG | 3126 | CATTAGGAGTAGATGCTTT |
| siRNA 1385 | 1385 | AAGCATCTACTCCTAATGG | 3127 | CCATTAGGAGTAGATGCTT |
| siRNA 1389 | 1389 | ATCTACTCCTAATGGTTAT | 3131 | ATAACCATTAGGAGTAGAT |
| siRNA 1390 | 1390 | TCTACTCCTAATGGTTATG | 3132 | CATAACCATTAGGAGTAGA |
| siRNA 1391 | 1391 | CTACTCCTAATGGTTATGA | 3133 | TCATAACCATTAGGAGTAG |
| siRNA 1394 | 1394 | CTCCTAATGGTTATGATAA | 3136 | TTATCATAACCATTAGGAG |
| siRNA 1396 | 1396 | CCTAATGGTTATGATAATG | 3138 | CATTATCATAACCATTAGG |
| siRNA 1401 | 1401 | TGGTTATGATAATGGCATT | 3143 | AATGCCATTATCATAACCA |
| siRNA 1404 | 1404 | TTATGATAATGGCATTATT | 3146 | AATAATGCCATTATCATAA |
| siRNA 1410 | 1410 | TAATGGCATTATTTGGGCC | 3152 | GGCCCAAATAATGCCATTA |
| siRNA 1418 | 1418 | TTATTTGGGCCACTTGGAA | 3160 | TTCCAAGTGGCCCAAATAA |
| siRNA 1419 | 1419 | TATTTGGGCCACTTGGAAA | 3161 | TTTCCAAGTGGCCCAAATA |
| siRNA 1420 | 1420 | ATTTGGGCCACTTGGAAAA | 3162 | TTTTCCAAGTGGCCCAAAT |
| siRNA 1426 | 1426 | GCCACTTGGAAAACCCGGT | 3168 | ACCGGGTTTTCCAAGTGGC |
| siRNA 1431 | 1431 | TTGGAAAACCCGGTGGTAT | 3173 | ATACCACCGGGTTTTCCAA |
| siRNA 1432 | 1432 | TGGAAAACCCGGTGGTATT | 3174 | AATACCACCGGGTTTTCCA |
| siRNA 1434 | 1434 | GAAAACCCGGTGGTATTCC | 3176 | GGAATACCACCGGGTTTTC |
| siRNA 1435 | 1435 | AAAACCCGGTGGTATTCCA | 3177 | TGGAATACCACCGGGTTTT |
| siRNA 1440 | 1440 | CCGGTGGTATTCCATGAAG | 3182 | CTTCATGGAATACCACCGG |
| siRNA 1461 | 1461 | AACCACTATGAAGATAATC | 3203 | GATTATCTTCATAGTGGTT |
| siRNA 1462 | 1462 | ACCACTATGAAGATAATCC | 3204 | GGATTATCTTCATAGTGGT |
| siRNA 1482 | 1482 | ATTCAACAGACTCACAATT | 3224 | AATTGTGAGTCTGTTGAAT |
| siRNA 1485 | 1485 | CAACAGACTCACAATTGGA | 3227 | TCCAATTGTGAGTCTGTTG |
| siRNA 1519 | 1519 | CACCTGGGGGGAGCCAAAC | 3261 | GTTTGGCTCCCCCCAGGTG |
| siRNA 1533 | 1533 | CAAACAGGCTGGAGACGTT | 3275 | AACGTCTCCAGCCTGTTTG |
| siRNA 1540 | 1540 | GCTGGAGACGTTTAAAAGA | 3282 | TCTTTTAAACGTCTCCAGC |
| siRNA 1588 | 1588 | GGACTTTATCTGAACAGAG | 3330 | CTCTGTTCAGATAAAGTCC |
| siRNA 1617 | 1617 | TTTTTCCTATTGGACAATG | 3359 | CATTGTCCAATAGGAAAAA |
| siRNA 1622 | 1622 | CCTATTGGACAATGGACTT | 3364 | AAGTCCATTGTCCAATAGG |
| siRNA 1623 | 1623 | CTATTGGACAATGGACTTG | 3365 | CAAGTCCATTGTCCAATAG |
| siRNA 1626 | 1626 | TTGGACAATGGACTTGCAA | 3368 | TTGCAAGTCCATTGTCCAA |
| siRNA 1627 | 1627 | TGGACAATGGACTTGCAAA | 3369 | TTTGCAAGTCCATTGTCCA |
| siRNA 1647 | 1647 | CTTCACTTCATTTTAAGAG | 3389 | CTCTTAAAATGAAGTGAAG |
| siRNA 1648 | 1648 | TTCACTTCATTTTAAGAGC | 3390 | GCTCTTAAAATGAAGTGAA |
| siRNA 1649 | 1649 | TCACTTCATTTTAAGAGCA | 3391 | TGCTCTTAAAATGAAGTGA |
| siRNA 1664 | 1664 | AGCAAAAGACCCCATGTTG | 3406 | CAACATGGGGTCTTTTGCT |
| siRNA 1672 | 1672 | ACCCCATGTTGAAAACTCC | 3414 | GGAGTTTTCAACATGGGGT |
| siRNA 1678 | 1678 | TGTTGAAAACTCCATAACA | 3420 | TGTTATGGAGTTTTCAACA |
| siRNA 1679 | 1679 | GTTGAAAACTCCATAACAG | 3421 | CTGTTATGGAGTTTTCAAC |
| siRNA 1680 | 1680 | TTGAAAACTCCATAACAGT | 3422 | ACTGTTATGGAGTTTTCAA |
| siRNA 1696 | 1696 | AGTTTTATGCTGATGATAA | 3438 | TTATCATCAGCATAAAACT |
| siRNA 1700 | 1700 | TTATGCTGATGATAATTTA | 3442 | TAAATTATCATCAGCATAA |
| siRNA 1710 | 1710 | GATAATTTATCTACATGCA | 3452 | TGCATGTAGATAAATTATC |

[0374] The siRNAs in subset C have the following characteristics:
[0375] Cross-reactivity: With 19mer in human FGG mRNA, with 17mer/19mer in NHP FGG
[0376] Specificity category: For human and NHP: AS2 or better, SS3 or better
[0377] miRNA seeds: AS+SS strand: seed region not conserved in human, mouse, and rat and not present in >4 species. AS strand: seed region not identical to seed region of known human miRNA
[0378] Off-target frequency: ≤30 human off-targets matched with 2 mismatches by antisense strand
[0379] SNPs: siRNA target sites do not harbor SNPs with a MAF≥1% (pos. 2-18)

[0380] The siRNA sequences in subset C were also selected for absence of seed regions in the AS or S strands that are identical to a seed region of known human miRNA to yield subset D. Subset D includes 147 siRNAs whose base sequences are shown in Table 6.

TABLE 6
Subset D siRNAs

| | Sense | | Antisense | |
|---|---|---|---|---|
| | strand | | strand | |
| | SEQ | Sense strand sequence | SEQ ID | Antisense strand sequence |
| siRNA Name | ID NO: | (5′-3′) | NO: | (5′-3′) |
| siRNA 233 | 233 | CAGACATCATGAGTTGGTC | 1975 | GACCAACTCATGATGTCTG |
| siRNA 251 | 251 | CCTTGCACCCCCGGAATTT | 1993 | AAATTCCGGGGGTGCAAGG |
| siRNA 254 | 254 | TGCACCCCCGGAATTTAAT | 1996 | ATTAAATTCCGGGGGTGCA |
| siRNA 255 | 255 | GCACCCCCGGAATTTAATT | 1997 | AATTAAATTCCGGGGGTGC |
| siRNA 261 | 261 | CCGGAATTTAATTCTCTAC | 2003 | GTAGAGAATTAAATTCCGG |
| siRNA 274 | 274 | CTCTACTTCTATGCTCTTT | 2016 | AAAGAGCATAGAAGTAGAG |
| siRNA 310 | 310 | TGTGTAGCATATGTTGCTA | 2052 | TAGCAACATATGCTACACA |
| siRNA 324 | 324 | TGCTACCAGAGACAACTGC | 2066 | GCAGTTGTCTCTGGTAGCA |
| siRNA 335 | 335 | ACAACTGCTGCATCTTAGA | 2077 | TCTAAGATGCAGCAGTTGT |
| siRNA 342 | 342 | CTGCATCTTAGATGAAAGA | 2084 | TCTTTCATCTAAGATGCAG |
| siRNA 343 | 343 | TGCATCTTAGATGAAAGAT | 2085 | ATCTTTCATCTAAGATGCA |
| siRNA 344 | 344 | GCATCTTAGATGAAAGATT | 2086 | AATCTTTCATCTAAGATGC |
| siRNA 347 | 347 | TCTTAGATGAAAGATTCGG | 2089 | CCGAATCTTTCATCTAAGA |
| siRNA 349 | 349 | TTAGATGAAAGATTCGGTA | 2091 | TACCGAATCTTTCATCTAA |
| siRNA 350 | 350 | TAGATGAAAGATTCGGTAG | 2092 | CTACCGAATCTTTCATCTA |
| siRNA 351 | 351 | AGATGAAAGATTCGGTAGT | 2093 | ACTACCGAATCTTTCATCT |
| siRNA 352 | 352 | GATGAAAGATTCGGTAGTT | 2094 | AACTACCGAATCTTTCATC |
| siRNA 354 | 354 | TGAAAGATTCGGTAGTTAT | 2096 | ATAACTACCGAATCTTTCA |
| siRNA 355 | 355 | GAAAGATTCGGTAGTTATT | 2097 | AATAACTACCGAATCTTTC |
| siRNA 359 | 359 | GATTCGGTAGTTATTGTCC | 2101 | GGACAATAACTACCGAATC |
| siRNA 363 | 363 | CGGTAGTTATTGTCCAACT | 2105 | AGTTGGACAATAACTACCG |
| siRNA 365 | 365 | GTAGTTATTGTCCAACTAC | 2107 | GTAGTTGGACAATAACTAC |
| siRNA 367 | 367 | AGTTATTGTCCAACTACCT | 2109 | AGGTAGTTGGACAATAACT |
| siRNA 373 | 373 | TGTCCAACTACCTGTGGCA | 2115 | TGCCACAGGTAGTTGGACA |
| siRNA 397 | 397 | GATTTCCTGTCTACTTATC | 2139 | GATAAGTAGACAGGAAATC |
| siRNA 398 | 398 | ATTTCCTGTCTACTTATCA | 2140 | TGATAAGTAGACAGGAAAT |
| siRNA 411 | 411 | TTATCAAACCAAAGTAGAC | 2153 | GTCTACTTTGGTTTGATAA |
| siRNA 423 | 423 | AGTAGACAAGGATCTACAG | 2165 | CTGTAGATCCTTGTCTACT |
| siRNA 426 | 426 | AGACAAGGATCTACAGTCT | 2168 | AGACTGTAGATCCTTGTCT |
| siRNA 432 | 432 | GGATCTACAGTCTTTGGAA | 2174 | TTCCAAAGACTGTAGATCC |
| siRNA 434 | 434 | ATCTACAGTCTTTGGAAGA | 2176 | TCTTCCAAAGACTGTAGAT |
| siRNA 447 | 447 | GGAAGACATCTTACATCAA | 2189 | TTGATGTAAGATGTCTTCC |
| siRNA 449 | 449 | AAGACATCTTACATCAAGT | 2191 | ACTTGATGTAAGATGTCTT |
| siRNA 493 | 493 | CAGCTGATAAAAGCAATCC | 2235 | GGATTGCTTTTATCAGCTG |
| siRNA 497 | 497 | TGATAAAAGCAATCCAACT | 2239 | AGTTGGATTGCTTTTATCA |
| siRNA 504 | 504 | AGCAATCCAACTCACTTAT | 2246 | ATAAGTGAGTTGGATTGCT |
| siRNA 505 | 505 | GCAATCCAACTCACTTATA | 2247 | TATAAGTGAGTTGGATTGC |
| siRNA 507 | 507 | AATCCAACTCACTTATAAT | 2249 | ATTATAAGTGAGTTGGATT |
| siRNA 508 | 508 | ATCCAACTCACTTATAATC | 2250 | GATTATAAGTGAGTTGGAT |
| siRNA 509 | 509 | TCCAACTCACTTATAATCC | 2251 | GGATTATAAGTGAGTTGGA |
| siRNA 510 | 510 | CCAACTCACTTATAATCCT | 2252 | AGGATTATAAGTGAGTTGG |
| siRNA 514 | 514 | CTCACTTATAATCCTGATG | 2256 | CATCAGGATTATAAGTGAG |
| siRNA 515 | 515 | TCACTTATAATCCTGATGA | 2257 | TCATCAGGATTATAAGTGA |
| siRNA 523 | 523 | AATCCTGATGAATCATCAA | 2265 | TTGATGATTCATCAGGATT |
| siRNA 528 | 528 | TGATGAATCATCAAAACCA | 2270 | TGGTTTTGATGATTCATCA |
| siRNA 544 | 544 | CCAAATATGATAGACGCTG | 2286 | CAGCGTCTATCATATTTGG |
| siRNA 554 | 554 | TAGACGCTGCTACTTTGAA | 2296 | TTCAAAGTAGCAGCGTCTA |
| siRNA 573 | 573 | GTCCAGGAAAATGTTAGAA | 2315 | TTCTAACATTTTCCTGGAC |
| siRNA 599 | 599 | TGAAATATGAAGCATCGAT | 2341 | ATCGATGCTTCATATTTCA |
| siRNA 600 | 600 | GAAATATGAAGCATCGATT | 2342 | AATCGATGCTTCATATTTC |
| siRNA 604 | 604 | TATGAAGCATCGATTTTAA | 2346 | TTAAAATCGATGCTTCATA |
| siRNA 606 | 606 | TGAAGCATCGATTTTAACA | 2348 | TGTTAAAATCGATGCTTCA |
| siRNA 609 | 609 | AGCATCGATTTTAACACAT | 2351 | ATGTGTTAAAATCGATGCT |
| siRNA 619 | 619 | TTAACACATGACTCAAGTA | 2361 | TACTTGAGTCATGTGTTAA |
| siRNA 624 | 624 | ACATGACTCAAGTATTCGA | 2366 | TCGAATACTTGAGTCATGT |
| siRNA 625 | 625 | CATGACTCAAGTATTCGAT | 2367 | ATCGAATACTTGAGTCATG |
| siRNA 716 | 716 | CACAGTGCCAGGAACCTTG | 2458 | CAAGGTTCCTGGCACTGTG |
| siRNA 730 | 730 | CCTTGCAAAGACACGGTGC | 2472 | GCACCGTGTCTTTGCAAGG |
| siRNA 731 | 731 | CTTGCAAAGACACGGTGCA | 2473 | TGCACCGTGTCTTTGCAAG |
| siRNA 733 | 733 | TGCAAAGACACGGTGCAAA | 2475 | TTTGCACCGTGTCTTTGCA |
| siRNA 753 | 753 | CCATGATATCACTGGGAAA | 2495 | TTTCCCAGTGATATCATGG |
| siRNA 770 | 770 | AAGATTGTCAAGACATTGC | 2512 | GCAATGTCTTGACAATCTT |
| siRNA 780 | 780 | AGACATTGCCAATAAGGGA | 2522 | TCCCTTATTGGCAATGTCT |
| siRNA 786 | 786 | TGCCAATAAGGGAGCTAAA | 2528 | TTTAGCTCCCTTATTGGCA |
| siRNA 800 | 800 | CTAAACAGAGCGGGCTTTA | 2542 | TAAAGCCCGCTCTGTTTAG |
| siRNA 802 | 802 | AAACAGAGCGGGCTTTACT | 2544 | AGTAAAGCCCGCTCTGTTT |
| siRNA 806 | 806 | AGAGCGGGCTTTACTTTAT | 2548 | ATAAAGTAAAGCCCGCTCT |
| siRNA 812 | 812 | GGCTTTACTTTATTAAACC | 2554 | GGTTTAATAAAGTAAAGCC |
| siRNA 825 | 825 | TAAACCTCTGAAAGCTAAC | 2567 | GTTAGCTTTCAGAGGTTTA |
| siRNA 833 | 833 | TGAAAGCTAACCAGCAATT | 2575 | AATTGCTGGTTAGCTTTCA |
| siRNA 850 | 850 | TTCTTAGTCTACTGTGAAA | 2592 | TTTCACAGTAGACTAAGAA |
| siRNA 894 | 894 | TGTGTTTCAGAAGAGACTT | 2636 | AAGTCTCTTCTGAAACACA |
| siRNA 904 | 904 | AAGAGACTTGATGGCAGTG | 2646 | CACTGCCATCAAGTCTCTT |
| siRNA 929 | 929 | TCAAGAAAAACTGGATTCA | 2671 | TGAATCCAGTTTTTCTTGA |
| siRNA 932 | 932 | AGAAAAACTGGATTCAATA | 2674 | TATTGAATCCAGTTTTTCT |
| siRNA 973 | 973 | TCTCCTACTGGCACAACAG | 2715 | CTGTTGTGCCAGTAGGAGA |
| siRNA 1003 | 1003 | GGAAATGAGAAGATTCATT | 2745 | AATGAATCTTCTCATTTCC |
| siRNA 1011 | 1011 | GAAGATTCATTTGATAAGC | 2753 | GCTTATCAAATGAATCTTC |
| siRNA 1013 | 1013 | AGATTCATTTGATAAGCAC | 2755 | GTGCTTATCAAATGAATCT |
| siRNA 1052 | 1052 | CATTAAGAGTGGAACTGGA | 2794 | TCCAGTTCCACTCTTAATG |
| siRNA 1060 | 1060 | GTGGAACTGGAAGACTGGA | 2802 | TCCAGTCTTCCAGTTCCAC |
| siRNA 1071 | 1071 | AGACTGGAATGGCAGAACC | 2813 | GGTTCTGCCATTCCAGTCT |
| siRNA 1085 | 1085 | GAACCAGTACTGCAGACTA | 2827 | TAGTCTGCAGTACTGGTTC |
| siRNA 1088 | 1088 | CCAGTACTGCAGACTATGC | 2830 | GCATAGTCTGCAGTACTGG |
| siRNA 1123 | 1123 | CCTGAAGCTGACAAGTACC | 2865 | GGTACTTGTCAGCTTCAGG |
| siRNA 1127 | 1127 | AAGCTGACAAGTACCGCCT | 2869 | AGGCGGTACTTGTCAGCTT |
| siRNA 1128 | 1128 | AGCTGACAAGTACCGCCTA | 2870 | TAGGCGGTACTTGTCAGCT |
| siRNA 1130 | 1130 | CTGACAAGTACCGCCTAAC | 2872 | GTTAGGCGGTACTTGTCAG |
| siRNA 1134 | 1134 | CAAGTACCGCCTAACATAT | 2876 | ATATGTTAGGCGGTACTTG |
| siRNA 1136 | 1136 | AGTACCGCCTAACATATGC | 2878 | GCATATGTTAGGCGGTACT |
| siRNA 1137 | 1137 | GTACCGCCTAACATATGCC | 2879 | GGCATATGTTAGGCGGTAC |
| siRNA 1138 | 1138 | TACCGCCTAACATATGCCT | 2880 | AGGCATATGTTAGGCGGTA |
| siRNA 1147 | 1147 | ACATATGCCTACTTCGCTG | 2889 | CAGCGAAGTAGGCATATGT |
| siRNA 1148 | 1148 | CATATGCCTACTTCGCTGG | 2890 | CCAGCGAAGTAGGCATATG |
| siRNA 1174 | 1174 | GCTGGAGATGCCTTTGATG | 2916 | CATCAAAGGCATCTCCAGC |
| siRNA 1178 | 1178 | GAGATGCCTTTGATGGCTT | 2920 | AAGCCATCAAAGGCATCTC |
| siRNA 1182 | 1182 | TGCCTTTGATGGCTTTGAT | 2924 | ATCAAAGCCATCAAAGGCA |
| siRNA 1197 | 1197 | TGATTTTGGCGATGATCCT | 2939 | AGGATCATCGCCAAAATCA |
| siRNA 1205 | 1205 | GCGATGATCCTAGTGACAA | 2947 | TTGTCACTAGGATCATCGC |
| siRNA 1215 | 1215 | TAGTGACAAGTTTTTCACA | 2957 | TGTGAAAAACTTGTCACTA |
| siRNA 1236 | 1236 | CCATAATGGCATGCAGTTC | 2978 | GAACTGCATGCCATTATGG |
| siRNA 1243 | 1243 | GGCATGCAGTTCAGTACCT | 2985 | AGGTACTGAACTGCATGCC |
| siRNA 1265 | 1265 | ACAATGACAATGATAAGTT | 3007 | AACTTATCATTGTCATTGT |
| siRNA 1278 | 1278 | TAAGTTTGAAGGCAACTGT | 3020 | ACAGTTGCCTTCAAACTTA |
| siRNA 1286 | 1286 | AAGGCAACTGTGCTGAACA | 3028 | TGTTCAGCACAGTTGCCTT |
| siRNA 1311 | 1311 | ATCTGGTTGGTGGATGAAC | 3053 | GTTCATCCACCAACCAGAT |
| siRNA 1315 | 1315 | GGTTGGTGGATGAACAAGT | 3057 | ACTTGTTCATCCACCAACC |
| siRNA 1323 | 1323 | GATGAACAAGTGTCACGCT | 3065 | AGCGTGACACTTGTTCATC |
| siRNA 1324 | 1324 | ATGAACAAGTGTCACGCTG | 3066 | CAGCGTGACACTTGTTCAT |
| siRNA 1325 | 1325 | TGAACAAGTGTCACGCTGG | 3067 | CCAGCGTGACACTTGTTCA |
| siRNA 1342 | 1342 | GGCCATCTCAATGGAGTTT | 3084 | AAACTCCATTGAGATGGCC |
| siRNA 1344 | 1344 | CCATCTCAATGGAGTTTAT | 3086 | ATAAACTCCATTGAGATGG |
| siRNA 1348 | 1348 | CTCAATGGAGTTTATTACC | 3090 | GGTAATAAACTCCATTGAG |
| siRNA 1349 | 1349 | TCAATGGAGTTTATTACCA | 3091 | TGGTAATAAACTCCATTGA |
| siRNA 1356 | 1356 | AGTTTATTACCAAGGTGGC | 3098 | GCCACCTTGGTAATAAACT |
| siRNA 1362 | 1362 | TTACCAAGGTGGCACTTAC | 3104 | GTAAGTGCCACCTTGGTAA |
| siRNA 1384 | 1384 | AAAGCATCTACTCCTAATG | 3126 | CATTAGGAGTAGATGCTTT |
| siRNA 1385 | 1385 | AAGCATCTACTCCTAATGG | 3127 | CCATTAGGAGTAGATGCTT |
| siRNA 1389 | 1389 | ATCTACTCCTAATGGTTAT | 3131 | ATAACCATTAGGAGTAGAT |
| siRNA 1390 | 1390 | TCTACTCCTAATGGTTATG | 3132 | CATAACCATTAGGAGTAGA |
| siRNA 1391 | 1391 | CTACTCCTAATGGTTATGA | 3133 | TCATAACCATTAGGAGTAG |
| siRNA 1394 | 1394 | CTCCTAATGGTTATGATAA | 3136 | TTATCATAACCATTAGGAG |
| siRNA 1396 | 1396 | CCTAATGGTTATGATAATG | 3138 | CATTATCATAACCATTAGG |
| siRNA 1401 | 1401 | TGGTTATGATAATGGCATT | 3143 | AATGCCATTATCATAACCA |
| siRNA 1404 | 1404 | TTATGATAATGGCATTATT | 3146 | AATAATGCCATTATCATAA |
| siRNA 1418 | 1418 | TTATTTGGGCCACTTGGAA | 3160 | TTCCAAGTGGCCCAAATAA |
| siRNA 1420 | 1420 | ATTTGGGCCACTTGGAAAA | 3162 | TTTTCCAAGTGGCCCAAAT |
| siRNA 1426 | 1426 | GCCACTTGGAAAACCCGGT | 3168 | ACCGGGTTTTCCAAGTGGC |
| siRNA 1462 | 1462 | ACCACTATGAAGATAATCC | 3204 | GGATTATCTTCATAGTGGT |
| siRNA 1482 | 1482 | ATTCAACAGACTCACAATT | 3224 | AATTGTGAGTCTGTTGAAT |
| siRNA 1485 | 1485 | CAACAGACTCACAATTGGA | 3227 | TCCAATTGTGAGTCTGTTG |
| siRNA 1533 | 1533 | CAAACAGGCTGGAGACGTT | 3275 | AACGTCTCCAGCCTGTTTG |
| siRNA 1540 | 1540 | GCTGGAGACGTTTAAAAGA | 3282 | TCTTTTAAACGTCTCCAGC |
| siRNA 1588 | 1588 | GGACTTTATCTGAACAGAG | 3330 | CTCTGTTCAGATAAAGTCC |
| siRNA 1617 | 1617 | TTTTTCCTATTGGACAATG | 3359 | CATTGTCCAATAGGAAAAA |
| siRNA 1622 | 1622 | CCTATTGGACAATGGACTT | 3364 | AAGTCCATTGTCCAATAGG |
| siRNA 1623 | 1623 | CTATTGGACAATGGACTTG | 3365 | CAAGTCCATTGTCCAATAG |
| siRNA 1627 | 1627 | TGGACAATGGACTTGCAAA | 3369 | TTTGCAAGTCCATTGTCCA |
| siRNA 1647 | 1647 | CTTCACTTCATTTTAAGAG | 3389 | CTCTTAAAATGAAGTGAAG |
| siRNA 1648 | 1648 | TTCACTTCATTTTAAGAGC | 3390 | GCTCTTAAAATGAAGTGAA |
| siRNA 1649 | 1649 | TCACTTCATTTTAAGAGCA | 3391 | TGCTCTTAAAATGAAGTGA |
| siRNA 1672 | 1672 | ACCCCATGTTGAAAACTCC | 3414 | GGAGTTTTCAACATGGGGT |
| siRNA 1678 | 1678 | TGTTGAAAACTCCATAACA | 3420 | TGTTATGGAGTTTTCAACA |
| siRNA 1680 | 1680 | TTGAAAACTCCATAACAGT | 3422 | ACTGTTATGGAGTTTTCAA |
| siRNA 1696 | 1696 | AGTTTTATGCTGATGATAA | 3438 | TTATCATCAGCATAAAACT |
| siRNA 1700 | 1700 | TTATGCTGATGATAATTTA | 3442 | TAAATTATCATCAGCATAA |
| siRNA 1710 | 1710 | GATAATTTATCTACATGCA | 3452 | TGCATGTAGATAAATTATC |

[0381] The siRNAs in subset D were selected to have the following characteristics:
[0382] Cross-reactivity: With 19mer in human FGG mRNA, with 17mer/19mer in NHP FGG
[0383] Specificity category: For human and NHP: AS2 or better, SS3 or better
[0384] miRNA seeds: AS+SS strand: seed region not conserved in human, mouse, and rat and not present in >4 species. AS+SS strand: seed region not identical to seed region of known human miRNA
[0385] Off-target frequency: ≤20 human off-targets matched with 2 mismatches by antisense strand
[0386] SNPs: siRNA target sites do not harbor SNPs with a MAF≥100 (pos. 2-18)

[0387] Subset E includes 53 siRNAs. The siRNAs in subset E include siRNAs from subset A and additional siRNAs that were tested in vitro (see, e.g., Table 7).

TABLE 7
Subset E siRNAs

| | Sense | | Antisense | |
|---|---|---|---|---|
| | strand | | strand | |
| | SEQ | Sense strand sequence | SEQ | Antisense strand sequence |
| siRNA Name | ID NO: | (5′-3′) | ID NO: | (5′-3′) |
| siRNA 233 | 233 | CAGACAUCAUGAGUUGGUC | 1975 | GACCAACUCAUGAUGUCUG |
| siRNA 261 | 261 | CCGGAAUUUAAUUCUCUAC | 2003 | GUAGAGAAUUAAAUUCCGG |
| siRNA 274 | 274 | CUCUACUUCUAUGCUCUUU | 2016 | AAAGAGCAUAGAAGUAGAG |
| siRNA 342 | 342 | CUGCAUCUUAGAUGAAAGA | 2084 | UCUUUCAUCUAAGAUGCAG |
| siRNA 343 | 343 | UGCAUCUUAGAUGAAAGAU | 2085 | AUCUUUCAUCUAAGAUGCA |
| siRNA 344 | 344 | GCAUCUUAGAUGAAAGAUU | 2086 | AAUCUUUCAUCUAAGAUGC |
| siRNA 347 | 347 | UCUUAGAUGAAAGAUUCGG | 2089 | CCGAAUCUUUCAUCUAAGA |
| siRNA 349 | 349 | UUAGAUGAAAGAUUCGGUA | 2091 | UACCGAAUCUUUCAUCUAA |
| siRNA 350 | 350 | UAGAUGAAAGAUUCGGUAG | 2092 | CUACCGAAUCUUUCAUCUA |
| siRNA 351 | 351 | AGAUGAAAGAUUCGGUAGU | 2093 | ACUACCGAAUCUUUCAUCU |
| siRNA 352 | 352 | GAUGAAAGAUUCGGUAGUU | 2094 | AACUACCGAAUCUUUCAUC |
| siRNA 354 | 354 | UGAAAGAUUCGGUAGUUAU | 2096 | AUAACUACCGAAUCUUUCA |
| siRNA 355 | 355 | GAAAGAUUCGGUAGUUAUU | 2097 | AAUAACUACCGAAUCUUUC |
| siRNA 359 | 359 | GAUUCGGUAGUUAUUGUCC | 2101 | GGACAAUAACUACCGAAUC |
| siRNA 363 | 363 | CGGUAGUUAUUGUCCAACU | 2105 | AGUUGGACAAUAACUACCG |
| siRNA 365 | 365 | GUAGUUAUUGUCCAACUAC | 2107 | GUAGUUGGACAAUAACUAC |
| siRNA 367 | 367 | AGUUAUUGUCCAACUACCU | 2109 | AGGUAGUUGGACAAUAACU |
| siRNA 397 | 397 | GAUUUCCUGUCUACUUAUC | 2139 | GAUAAGUAGACAGGAAAUC |
| siRNA 398 | 398 | AUUUCCUGUCUACUUAUCA | 2140 | UGAUAAGUAGACAGGAAAU |
| siRNA 423 | 423 | AGUAGACAAGGAUCUACAG | 2165 | CUGUAGAUCCUUGUCUACU |
| siRNA 432 | 432 | GGAUCUACAGUCUUUGGAA | 2174 | UUCCAAAGACUGUAGAUCC |
| siRNA 434 | 434 | AUCUACAGUCUUUGGAAGA | 2176 | UCUUCCAAAGACUGUAGAU |
| siRNA 447 | 447 | GGAAGACAUCUUACAUCAA | 2189 | UUGAUGUAAGAUGUCUUCC |
| siRNA 449 | 449 | AAGACAUCUUACAUCAAGU | 2191 | ACUUGAUGUAAGAUGUCUU |
| siRNA 493 | 493 | CAGCUGAUAAAAGCAAUCC | 2235 | GGAUUGCUUUUAUCAGCUG |
| siRNA 497 | 497 | UGAUAAAAGCAAUCCAACU | 2239 | AGUUGGAUUGCUUUUAUCA |
| siRNA 523 | 523 | AAUCCUGAUGAAUCAUCAA | 2265 | UUGAUGAUUCAUCAGGAUU |
| siRNA 528 | 528 | UGAUGAAUCAUCAAAACCA | 2270 | UGGUUUUGAUGAUUCAUCA |
| siRNA 573 | 573 | GUCCAGGAAAAUGUUAGAA | 2315 | UUCUAACAUUUUCCUGGAC |
| siRNA 753 | 753 | CCAUGAUAUCACUGGGAAA | 2495 | UUUCCCAGUGAUAUCAUGG |
| siRNA 770 | 770 | AAGAUUGUCAAGACAUUGC | 2512 | GCAAUGUCUUGACAAUCUU |
| siRNA 806 | 806 | AGAGCGGGCUUUACUUUAU | 2548 | AUAAAGUAAAGCCCGCUCU |
| siRNA 825 | 825 | UAAACCUCUGAAAGCUAAC | 2567 | GUUAGCUUUCAGAGGUUUA |
| siRNA 929 | 929 | UCAAGAAAAACUGGAUUCA | 2671 | UGAAUCCAGUUUUUCUUGA |
| siRNA 932 | 932 | AGAAAAACUGGAUUCAAUA | 2674 | UAUUGAAUCCAGUUUUUCU |
| siRNA 1003 | 1003 | GGAAAUGAGAAGAUUCAUU | 2745 | AAUGAAUCUUCUCAUUUCC |
| siRNA 1011 | 1011 | GAAGAUUCAUUUGAUAAGC | 2753 | GCUUAUCAAAUGAAUCUUC |
| siRNA 1013 | 1013 | AGAUUCAUUUGAUAAGCAC | 2755 | GUGCUUAUCAAAUGAAUCU |
| siRNA 1052 | 1052 | CAUUAAGAGUGGAACUGGA | 2794 | UCCAGUUCCACUCUUAAUG |
| siRNA 1265 | 1265 | ACAAUGACAAUGAUAAGUU | 3007 | AACUUAUCAUUGUCAUUGU |
| siRNA 1278 | 1278 | UAAGUUUGAAGGCAACUGU | 3020 | ACAGUUGCCUUCAAACUUA |
| siRNA 1348 | 1348 | CUCAAUGGAGUUUAUUACC | 3090 | GGUAAUAAACUCCAUUGAG |
| siRNA 1349 | 1349 | UCAAUGGAGUUUAUUACCA | 3091 | UGGUAAUAAACUCCAUUGA |
| siRNA 1356 | 1356 | AGUUUAUUACCAAGGUGGC | 3098 | GCCACCUUGGUAAUAAACU |
| siRNA 1384 | 1384 | AAAGCAUCUACUCCUAAUG | 3126 | CAUUAGGAGUAGAUGCUUU |
| siRNA 1385 | 1385 | AAGCAUCUACUCCUAAUGG | 3127 | CCAUUAGGAGUAGAUGCUU |
| siRNA 1389 | 1389 | AUCUACUCCUAAUGGUUAU | 3131 | AUAACCAUUAGGAGUAGAU |
| siRNA 1390 | 1390 | UCUACUCCUAAUGGUUAUG | 3132 | CAUAACCAUUAGGAGUAGA |
| siRNA 1391 | 1391 | CUACUCCUAAUGGUUAUGA | 3133 | UCAUAACCAUUAGGAGUAG |
| siRNA 1394 | 1394 | CUCCUAAUGGUUAUGAUAA | 3136 | UUAUCAUAACCAUUAGGAG |
| siRNA 1396 | 1396 | CCUAAUGGUUAUGAUAAUG | 3138 | CAUUAUCAUAACCAUUAGG |
| siRNA 1418 | 1418 | UUAUUUGGGCCACUUGGAA | 3160 | UUCCAAGUGGCCCAAAUAA |
| siRNA 1462 | 1462 | ACCACUAUGAAGAUAAUCC | 3204 | GGAUUAUCUUCAUAGUGGU |

[0388] In some cases, the sense strand of any of the siRNAs of subset E comprises siRNA with a particular modification pattern. In this example modification pattern, position 9 counting from the 5′ end of the of the sense strand is has the 2′F modification. Where a “2′F modification” is denoted, it is intended to mean that a 2′F is included. In this example modification pattern, when position 9 of the sense strand is a pyrimidine, then all purines in the sense strand have the 2′Ome modification. Where a “2′Ome modification” is denoted, it is intended to mean that a 2′Ome is included. In this example modification pattern, when position 9 is the only pyrimidine between positions 5 and 11 of the sense stand, then position 9 is the only position with the 2′F modification in the sense strand. In this example modification pattern, when position 9 and only one other base between positions 5 and 11 of the sense strand are pyrimidines, then both of these pyrimidines are the only two positions with the 2′F modification in the sense strand. In this example modification pattern, when position 9 and only two other bases between positions 5 and 11 of the sense strand are pyrimidines, and those two other pyrimidines 're in adjacent positions so that there would be not three 2′F modifications in a row, then any combination of 2′F modifications can be made that give three 2′F modifications in total. In this example modification pattern, when there are >2 pyrimidines between positions 5 and 11 of the sense strand, then all combinations of pyrimidines having the 2′F modification are allowed that have three to five 2′F modifications in total, provided that the sense strand does not have three 2′F modifications in a row.

[0389] In this example modification pattern, when position 9 of the sense strand is a purine, then all purines in the sense strand have the 2′Ome modification. In this example modification pattern, when position 9 is the only purine between positions 5 and 11 of the sense stand, then position 9 is the only position with the 2′F modification in the sense strand. In this example modification pattern, when position 9 and only one other base between positions 5 and 11 of the sense strand are purines, then both of these purines are the only two positions with the 2′F modification in the sense strand. In this example modification pattern, when position 9 and only two other bases between positions 5 and 11 of the sense strand are purines, and those two other purines are in adjacent positions so that there would be not three 2′F modifications in a row, then any combination of 2′F modifications can be made that give three 2′F modifications in total. In this example modification pattern, when there are >2 purines between positions 5 and 11 of the sense strand, then all combinations of purines having the 2′F modification are allowed that have three to five 2′F modifications in total, provided that the sense strand does not have three 2′F modifications in a row. In some cases, the sense strand of any of the siRNAs of subset E comprises a modification pattern which conforms to these sense strand rules (Table 8A).

[0390] In some cases, the antisense strand of any of the siRNAs of subset E comprises modification pattern 9AS (Table 8A). The siRNAs in subset E may comprise any other modification pattern(s).

TABLE 8A
Modified siRNA sequences

| | Sense | | Antisense | |
|---|---|---|---|---|
| | strand | | strand | |
| siRNA | SEQ ID | Sense strand sequence | SEQ | Antisense strand sequence |
| Name | NO: | (5′-3′) | ID NO: | (5′-3′) |
| ETD01663 | 3485 | cagacAfucAfuGfaguugguasusu | 3538 | uAfcCfaAfcUfcAfuGfaUfgUfcUfgsusu |
| ETD01664 | 3486 | ccggaaUfuUfaauucucuaasusu | 3539 | uUfaGfaGfaAfuUfaAfaUfuCfcGfgsusu |
| ETD01665 | 3487 | cucuaCfUfUfCfUfaugcucuuasusu | 3540 | uAfaGfaGfcAfuAfgAfaGfuAfgAfgsusu |
| ETD01666 | 3488 | cugcaUfCfUfUfagaugaaagasusu | 3541 | uCfuUfuCfaUfcUfaAfgAfuGfcAfgsusu |
| ETD01667 | 3489 | ugcaucuuAfGfaugaaagaasusu | 3542 | uUfcUfuUfcAfuCfuAfaGfaUfgCfasusu |
| ETD01668 | 3490 | gcaucuuAfGfaugaaagauasusu | 3543 | uAfuCfuUfuCfaUfcUfaAfgAfuGfcsusu |
| ETD01669 | 3491 | ucuuAfGfauGfaAfagauucgasusu | 3544 | uCfgAfaUfcUfuUfcAfuCfuAfaGfasusu |
| ETD01670 | 3492 | uuagAfuGfAfAfAfgauucgguasusu | 3545 | uAfcCfgAfaUfcUfuUfcAfuCfuAfasusu |
| ETD01671 | 3493 | uagauGfAfAfAfgAfuucgguaasusu | 3546 | uUfaCfcGfaAfuCfuUfuCfaUfcUfasusu |
| ETD01672 | 3494 | agauGfAfAfAfGfauucgguagasusu | 3547 | uCfuAfcCfgAfaUfcUfuUfcAfuCfususu |
| ETD01673 | 3495 | gaugAfAfAfGfAfuucgguaguasusu | 3548 | uAfcUfaCfcGfaAfuCfuUfuCfaUfcsusu |
| ETD01674 | 3496 | ugaaagaUfUfcgguaguuaasusu | 3549 | uUfaAfcUfaCfcGfaAfuCfuUfuCfasusu |
| ETD01675 | 3497 | gaaagaUfuCfgguaguuauasusu | 3550 | uAfuAfaCfuAfcCfgAfaUfcUfuUfcsusu |
| ETD01676 | 3498 | gauucGfGfuAfGfuuauugucasusu | 3551 | uGfaCfaAfuAfaCfuAfcCfgAfaUfcsusu |
| ETD01677 | 3499 | cgguAfGfuuAfuuguccaacasusu | 3552 | uGfuUfgGfaCfaAfuAfaCfuAfcCfgsusu |
| ETD01678 | 3500 | guagUfUfaUfUfgUfccaacuaasusu | 3553 | uUfaGfuUfgGfaCfaAfuAfaCfuAfcsusu |
| ETD01679 | 3501 | aguuaUfUfgUfcCfaacuaccasusu | 3554 | uGfgUfaGfuUfgGfaCfaAfuAfaCfususu |
| ETD01680 | 3502 | gauuuccuGfucuacuuauasusu | 3555 | uAfuAfaGfuAfgAfcAfgGfaAfaUfcsusu |
| ETD01681 | 3503 | auuuCfCfugUfcUfacuuaucasusu | 3556 | uGfaUfaAfgUfaGfaCfaGfgAfaAfususu |
| ETD01682 | 3504 | aguaGfAfcAfAfgGfaucuacaasusu | 3557 | uUfgUfaGfaUfcCfuUfgUfcUfaCfususu |
| ETD01683 | 3505 | ggaucuAfcAfGfucuuuggaasusu | 3558 | uUfcCfaAfaGfaCfuGfuAfgAfuCfcsusu |
| ETD01684 | 3506 | aucuaCfagUfcUfuuggaagasusu | 3559 | uCfuUfcCfaAfaGfaCfuGfuAfgAfususu |
| ETD01685 | 3507 | ggaagaCfaUfcUfuacaucaasusu | 3560 | uUfgAfuGfuAfaGfaUfgUfcUfuCfcsusu |
| ETD01686 | 3508 | aagaCfaUfCfUfUfacaucaagasusu | 3561 | uCfuUfgAfuGfuAfaGfaUfgUfcUfususu |
| ETD01687 | 3509 | cagcuGfAfuAfaAfagcaaucasusu | 3562 | uGfaUfuGfcUfuUfuAfuCfaGfcUfgsusu |
| ETD01688 | 3510 | ugauAfAfaAfGfcAfauccaacasusu | 3563 | uGfuUfgGfaUfuGfcUfuUfuAfuCfasusu |
| ETD01689 | 3511 | aaucCfUfgaUfgaaucaucaasusu | 3564 | uUfgAfuGfaUfuCfaUfcAfgGfaUfususu |
| ETD01690 | 3512 | ugaugaaUfCfaUfcaaaaccasusu | 3565 | uGfgUfuUfuGfaUfgAfuUfcAfuCfasusu |
| ETD01691 | 3513 | guccAfGfgAfAfaAfuguuagaasusu | 3566 | uUfcUfaAfcAfuUfuUfcCfuGfgAfcsusu |
| ETD01692 | 3514 | ccaugaUfaUfCfacugggaaasusu | 3567 | uUfuCfcCfaGfuGfaUfaUfcAfuGfgsusu |
| ETD01693 | 3515 | aagaUfUfgUfCfaagacauugasusu | 3568 | uCfaAfuGfuCfuUfgAfcAfaUfcUfususu |
| ETD01694 | 3516 | agagCfgggCfuUfuacuuuaasusu | 3569 | uUfaAfaGfuAfaAfgCfcCfgCfuCfususu |
| ETD01695 | 3517 | uaaaCfCfUfCfUfgaaagcuaaasusu | 3570 | uUfuAfgCfuUfuCfaGfaGfgUfuUfasusu |
| ETD01696 | 3518 | ucaaGfAfAfAfAfacuggauucasusu | 3571 | uGfaAfuCfcAfgUfuUfuUfcUfuGfasusu |
| ETD01697 | 3519 | agaaaaaCfUfggauucaauasusu | 3572 | uAfuUfgAfaUfcCfaGfuUfuUfuCfususu |
| ETD01698 | 3520 | ggaaAfuGfAfGfAfagauucauasusu | 3573 | uAfuGfaAfuCfuUfcUfcAfuUfuCfcsusu |
| ETD01699 | 3521 | gaagAfuucAfuuugauaagasusu | 3574 | uCfuUfaUfcAfaAfuGfaAfuCfuUfcsusu |
| ETD01700 | 3522 | agauUfCfaUfUfugauaagcaasusu | 3575 | uUfgCfuUfaUfcAfaAfuGfaAfuCfususu |
| ETD01701 | 3523 | cauuAfAfgAfGfuGfgaacuggasusu | 3576 | uCfcAfgUfuCfcAfcUfcUfuAfaUfgsusu |
| ETD01702 | 3524 | acaauGfAfcAfAfugauaaguasusu | 3577 | uAfcUfuAfuCfaUfuGfuCfaUfuGfususu |
| ETD01703 | 3525 | uaaguuuGfAfAfGfgcaacugasusu | 3578 | uCfaGfuUfgCfcUfuCfaAfaCfuUfasusu |
| ETD01704 | 3526 | cucaAfuGfGfAfGfuuuauuacasusu | 3579 | uGfuAfaUfaAfaCfuCfcAfuUfgAfgsusu |
| ETD01705 | 3527 | ucaauGfGfAfGfuuuauuaccasusu | 3580 | uGfgUfaAfuAfaAfcUfcCfaUfuGfasusu |
| ETD01706 | 3528 | aguuuAfuuAfccaagguggasusu | 3581 | uCfcAfcCfuUfgGfuAfaUfaAfaCfususu |
| ETD01707 | 3529 | aaagCfaUfcUfaCfuccuaauasusu | 3582 | uAfuUfaGfgAfgUfaGfaUfgCfuUfususu |
| ETD01708 | 3530 | aagcAfucuAfcuccuaaugasusu | 3583 | uCfaUfuAfgGfaGfuAfgAfuGfcUfususu |
| ETD01709 | 3531 | aucuaCfUfCfCfUfaaugguuaasusu | 3584 | uUfaAfcCfaUfuAfgGfaGfuAfgAfususu |
| ETD01710 | 3532 | ucuaCfUfCfCfUfaaugguuauasusu | 3585 | uAfuAfaCfcAfuUfaGfgAfgUfaGfasusu |
| ETD01711 | 3533 | cuacuccuAfAfugguuaugasusu | 3586 | uCfaUfaAfcCfaUfuAfgGfaGfuAfgsusu |
| ETD01712 | 3534 | cuccuAfAfuGfGfuuaugauaasusu | 3587 | uUfaUfcAfuAfaCfcAfuUfaGfgAfgsusu |
| ETD01713 | 3535 | ccuaaUfggUfUfaugauaauasusu | 3588 | uAfuUfaUfcAfuAfaCfcAfuUfaGfgsusu |
| ETD01714 | 3536 | uuauuuGfgGfccacuuggaasusu | 3589 | uUfcCfaAfgUfgGfcCfcAfaAfuAfasusu |
| ETD01715 | 3537 | accacuAfuGfaAfgauaaucasusu | 3590 | uGfaUfuAfuCfuUfcAfuAfgUfgGfususu |

[0391] In Table 8A, Nf (Af, Cf, Gf, Uf, or Tf) is a 2′ fluoro-modified nucleoside, a (a, c, g, u, or t) is a 2′ O-methyl modified nucleoside. and “s” is a phosphorothioate linkage.

[0392] Any siRNA among any of subsets A-E may comprise any modification pattern described herein. If a sequence is a different number of nucleotides in length than a modification pattern, the modification pattern may still be used with the appropriate number of additional nucleotides added 5′ or 3′ to match the number of nucleotides in the modification pattern. For example, if a sense or antisense strand of the siRNA among any of subsets A-E comprises 19 nucleotides, and a modification pattern comprises 21 nucleotides, UU may be added onto the 5′ end of the sense or antisense strand. Using a different algorithm for analyzing siRNA specificity, an additional bioinformatically selected set of siRNAs was generated. Prioritizing sequences for target specificity, species cross-reactivity, miRNA seed region sequences and SNPs as described above yields subset G. Subset G contains 131 siRNAs whose base sequences are shown in Table 8B.

TABLE 8B
Subset G siRNAs

| Sense | | Antisense | |
|---|---|---|---|
| strand | | strand | |
| SEQ | Sense strand sequence | SEQ ID | Antisense strand sequence |
| ID NO: | (5′-3′) | NO: | (5′-3′) |
| 236 | ACATCATGAGTTGGTCCTT | 1978 | AAGGACCAACTCATGATGT |
| 243 | GAGTTGGTCCTTGCACCCC | 1985 | GGGGTGCAAGGACCAACTC |
| 259 | CCCCGGAATTTAATTCTCT | 2001 | AGAGAATTAAATTCCGGGG |
| 264 | GAATTTAATTCTCTACTTC | 2006 | GAAGTAGAGAATTAAATTC |
| 276 | CTACTTCTATGCTCTTTTA | 2018 | TAAAAGAGCATAGAAGTAG |
| 305 | CAACATGTGTAGCATATGT | 2047 | ACATATGCTACACATGTTG |
| 307 | ACATGTGTAGCATATGTTG | 2049 | CAACATATGCTACACATGT |
| 312 | TGTAGCATATGTTGCTACC | 2054 | GGTAGCAACATATGCTACA |
| 321 | TGTTGCTACCAGAGACAAC | 2063 | GTTGTCTCTGGTAGCAACA |
| 325 | GCTACCAGAGACAACTGCT | 2067 | AGCAGTTGTCTCTGGTAGC |
| 326 | CTACCAGAGACAACTGCTG | 2068 | CAGCAGTTGTCTCTGGTAG |
| 330 | CAGAGACAACTGCTGCATC | 2072 | GATGCAGCAGTTGTCTCTG |
| 346 | ATCTTAGATGAAAGATTCG | 2088 | CGAATCTTTCATCTAAGAT |
| 357 | AAGATTCGGTAGTTATTGT | 2099 | ACAATAACTACCGAATCTT |
| 370 | TATTGTCCAACTACCTGTG | 2112 | CACAGGTAGTTGGACAATA |
| 371 | ATTGTCCAACTACCTGTGG | 2113 | CCACAGGTAGTTGGACAAT |
| 374 | GTCCAACTACCTGTGGCAT | 2116 | ATGCCACAGGTAGTTGGAC |
| 375 | TCCAACTACCTGTGGCATT | 2117 | AATGCCACAGGTAGTTGGA |
| 385 | TGTGGCATTGCAGATTTCC | 2127 | GGAAATCTGCAATGCCACA |
| 393 | TGCAGATTTCCTGTCTACT | 2135 | AGTAGACAGGAAATCTGCA |
| 408 | TACTTATCAAACCAAAGTA | 2150 | TACTTTGGTTTGATAAGTA |
| 413 | ATCAAACCAAAGTAGACAA | 2155 | TTGTCTACTTTGGTTTGAT |
| 425 | TAGACAAGGATCTACAGTC | 2167 | GACTGTAGATCCTTGTCTA |
| 443 | CTTTGGAAGACATCTTACA | 2185 | TGTAAGATGTCTTCCAAAG |
| 451 | GACATCTTACATCAAGTTG | 2193 | CAACTTGATGTAAGATGTC |
| 496 | CTGATAAAAGCAATCCAAC | 2238 | GTTGGATTGCTTTTATCAG |
| 498 | GATAAAAGCAATCCAACTC | 2240 | GAGTTGGATTGCTTTTATC |
| 503 | AAGCAATCCAACTCACTTA | 2245 | TAAGTGAGTTGGATTGCTT |
| 506 | CAATCCAACTCACTTATAA | 2248 | TTATAAGTGAGTTGGATTG |
| 545 | CAAATATGATAGACGCTGC | 2287 | GCAGCGTCTATCATATTTG |
| 553 | ATAGACGCTGCTACTTTGA | 2295 | TCAAAGTAGCAGCGTCTAT |
| 560 | CTGCTACTTTGAAGTCCAG | 2302 | CTGGACTTCAAAGTAGCAG |
| 565 | ACTTTGAAGTCCAGGAAAA | 2307 | TTTTCCTGGACTTCAAAGT |
| 602 | AATATGAAGCATCGATTTT | 2344 | AAAATCGATGCTTCATATT |
| 603 | ATATGAAGCATCGATTTTA | 2345 | TAAAATCGATGCTTCATAT |
| 626 | ATGACTCAAGTATTCGATA | 2368 | TATCGAATACTTGAGTCAT |
| 670 | AATCAAAAGATTGTTAACC | 2412 | GGTTAACAATCTTTTGATT |
| 674 | AAAAGATTGTTAACCTGAA | 2416 | TTCAGGTTAACAATCTTTT |
| 694 | GAGAAGGTAGCCCAGCTTG | 2436 | CAAGCTGGGCTACCTTCTC |
| 726 | GGAACCTTGCAAAGACACG | 2468 | CGTGTCTTTGCAAGGTTCC |
| 742 | ACGGTGCAAATCCATGATA | 2484 | TATCATGGATTTGCACCGT |
| 743 | CGGTGCAAATCCATGATAT | 2485 | ATATCATGGATTTGCACCG |
| 747 | GCAAATCCATGATATCACT | 2489 | AGTGATATCATGGATTTGC |
| 755 | ATGATATCACTGGGAAAGA | 2497 | TCTTTCCCAGTGATATCAT |
| 776 | GTCAAGACATTGCCAATAA | 2518 | TTATTGGCAATGTCTTGAC |
| 779 | AAGACATTGCCAATAAGGG | 2521 | CCCTTATTGGCAATGTCTT |
| 789 | CAATAAGGGAGCTAAACAG | 2531 | CTGTTTAGCTCCCTTATTG |
| 793 | AAGGGAGCTAAACAGAGCG | 2535 | CGCTCTGTTTAGCTCCCTT |
| 799 | GCTAAACAGAGCGGGCTTT | 2541 | AAAGCCCGCTCTGTTTAGC |
| 803 | AACAGAGCGGGCTTTACTT | 2545 | AAGTAAAGCCCGCTCTGTT |
| 836 | AAGCTAACCAGCAATTCTT | 2578 | AAGAATTGCTGGTTAGCTT |
| 856 | GTCTACTGTGAAATCGATG | 2598 | CATCGATTTCACAGTAGAC |
| 867 | AATCGATGGGTCTGGAAAT | 2609 | ATTTCCAGACCCATCGATT |
| 875 | GGTCTGGAAATGGATGGAC | 2617 | GTCCATCCATTTCCAGACC |
| 876 | GTCTGGAAATGGATGGACT | 2618 | AGTCCATCCATTTCCAGAC |
| 950 | ATAAAGAAGGATTTGGACA | 2692 | TGTCCAAATCCTTCTTTAT |
| 970 | CTGTCTCCTACTGGCACAA | 2712 | TTGTGCCAGTAGGAGACAG |
| 971 | TGTCTCCTACTGGCACAAC | 2713 | GTTGTGCCAGTAGGAGACA |
| 985 | ACAACAGAATTTTGGCTGG | 2727 | CCAGCCAAAATTCTGTTGT |
| 1000 | CTGGGAAATGAGAAGATTC | 2742 | GAATCTTCTCATTTCCCAG |
| 1008 | TGAGAAGATTCATTTGATA | 2750 | TATCAAATGAATCTTCTCA |
| 1009 | GAGAAGATTCATTTGATAA | 2751 | TTATCAAATGAATCTTCTC |
| 1020 | TTTGATAAGCACACAGTCT | 2762 | AGACTGTGTGCTTATCAAA |
| 1023 | GATAAGCACACAGTCTGCC | 2765 | GGCAGACTGTGTGCTTATC |
| 1033 | CAGTCTGCCATCCCATATG | 2775 | CATATGGGATGGCAGACTG |
| 1037 | CTGCCATCCCATATGCATT | 2779 | AATGCATATGGGATGGCAG |
| 1038 | TGCCATCCCATATGCATTA | 2780 | TAATGCATATGGGATGGCA |
| 1044 | CCCATATGCATTAAGAGTG | 2786 | CACTCTTAATGCATATGGG |
| 1045 | CCATATGCATTAAGAGTGG | 2787 | CCACTCTTAATGCATATGG |
| 1081 | GGCAGAACCAGTACTGCAG | 2823 | CTGCAGTACTGGTTCTGCC |
| 1090 | AGTACTGCAGACTATGCCA | 2832 | TGGCATAGTCTGCAGTACT |
| 1099 | GACTATGCCATGTTCAAGG | 2841 | CCTTGAACATGGCATAGTC |
| 1100 | ACTATGCCATGTTCAAGGT | 2842 | ACCTTGAACATGGCATAGT |
| 1114 | AAGGTGGGACCTGAAGCTG | 2856 | CAGCTTCAGGTCCCACCTT |
| 1152 | TGCCTACTTCGCTGGTGGG | 2894 | CCCACCAGCGAAGTAGGCA |
| 1156 | TACTTCGCTGGTGGGGATG | 2898 | CATCCCCACCAGCGAAGTA |
| 1196 | TTGATTTTGGCGATGATCC | 2938 | GGATCATCGCCAAAATCAA |
| 1199 | ATTTTGGCGATGATCCTAG | 2941 | CTAGGATCATCGCCAAAAT |
| 1211 | ATCCTAGTGACAAGTTTTT | 2953 | AAAAACTTGTCACTAGGAT |
| 1212 | TCCTAGTGACAAGTTTTTC | 2954 | GAAAAACTTGTCACTAGGA |
| 1213 | CCTAGTGACAAGTTTTTCA | 2955 | TGAAAAACTTGTCACTAGG |
| 1218 | TGACAAGTTTTTCACATCC | 2960 | GGATGTGAAAAACTTGTCA |
| 1219 | GACAAGTTTTTCACATCCC | 2961 | GGGATGTGAAAAACTTGTC |
| 1231 | ACATCCCATAATGGCATGC | 2973 | GCATGCCATTATGGGATGT |
| 1232 | CATCCCATAATGGCATGCA | 2974 | TGCATGCCATTATGGGATG |
| 1241 | ATGGCATGCAGTTCAGTAC | 2983 | GTACTGAACTGCATGCCAT |
| 1245 | CATGCAGTTCAGTACCTGG | 2987 | CCAGGTACTGAACTGCATG |
| 1250 | AGTTCAGTACCTGGGACAA | 2992 | TTGTCCCAGGTACTGAACT |
| 1252 | TTCAGTACCTGGGACAATG | 2994 | CATTGTCCCAGGTACTGAA |
| 1269 | TGACAATGATAAGTTTGAA | 3011 | TTCAAACTTATCATTGTCA |
| 1273 | AATGATAAGTTTGAAGGCA | 3015 | TGCCTTCAAACTTATCATT |
| 1279 | AAGTTTGAAGGCAACTGTG | 3021 | CACAGTTGCCTTCAAACTT |
| 1303 | CAGGATGGATCTGGTTGGT | 3045 | ACCAACCAGATCCATCCTG |
| 1305 | GGATGGATCTGGTTGGTGG | 3047 | CCACCAACCAGATCCATCC |
| 1327 | AACAAGTGTCACGCTGGCC | 3069 | GGCCAGCGTGACACTTGTT |
| 1329 | CAAGTGTCACGCTGGCCAT | 3071 | ATGGCCAGCGTGACACTTG |
| 1334 | GTCACGCTGGCCATCTCAA | 3076 | TTGAGATGGCCAGCGTGAC |
| 1355 | GAGTTTATTACCAAGGTGG | 3097 | CCACCTTGGTAATAAACTC |
| 1357 | GTTTATTACCAAGGTGGCA | 3099 | TGCCACCTTGGTAATAAAC |
| 1363 | TACCAAGGTGGCACTTACT | 3105 | AGTAAGTGCCACCTTGGTA |
| 1364 | ACCAAGGTGGCACTTACTC | 3106 | GAGTAAGTGCCACCTTGGT |
| 1367 | AAGGTGGCACTTACTCAAA | 3109 | TTTGAGTAAGTGCCACCTT |
| 1371 | TGGCACTTACTCAAAAGCA | 3113 | TGCTTTTGAGTAAGTGCCA |
| 1388 | CATCTACTCCTAATGGTTA | 3130 | TAACCATTAGGAGTAGATG |
| 1392 | TACTCCTAATGGTTATGAT | 3134 | ATCATAACCATTAGGAGTA |
| 1424 | GGGCCACTTGGAAAACCCG | 3166 | CGGGTTTTCCAAGTGGCCC |
| 1429 | ACTTGGAAAACCCGGTGGT | 3171 | ACCACCGGGTTTTCCAAGT |
| 1430 | CTTGGAAAACCCGGTGGTA | 3172 | TACCACCGGGTTTTCCAAG |
| 1433 | GGAAAACCCGGTGGTATTC | 3175 | GAATACCACCGGGTTTTCC |
| 1471 | AAGATAATCCCATTCAACA | 3213 | TGTTGAATGGGATTATCTT |
| 1472 | AGATAATCCCATTCAACAG | 3214 | CTGTTGAATGGGATTATCT |
| 1476 | AATCCCATTCAACAGACTC | 3218 | GAGTCTGTTGAATGGGATT |
| 1486 | AACAGACTCACAATTGGAG | 3228 | CTCCAATTGTGAGTCTGTT |
| 1489 | AGACTCACAATTGGAGAAG | 3231 | CTTCTCCAATTGTGAGTCT |
| 1516 | CACCACCTGGGGGGAGCCA | 3258 | TGGCTCCCCCCAGGTGGTG |
| 1518 | CCACCTGGGGGGAGCCAAA | 3260 | TTTGGCTCCCCCCAGGTGG |
| 1524 | GGGGGGAGCCAAACAGGCT | 3266 | AGCCTGTTTGGCTCCCCCC |
| 1525 | GGGGGAGCCAAACAGGCTG | 3267 | CAGCCTGTTTGGCTCCCCC |
| 1526 | GGGGAGCCAAACAGGCTGG | 3268 | CCAGCCTGTTTGGCTCCCC |
| 1534 | AAACAGGCTGGAGACGTTT | 3276 | AAACGTCTCCAGCCTGTTT |
| 1539 | GGCTGGAGACGTTTAAAAG | 3281 | CTTTTAAACGTCTCCAGCC |
| 1593 | TTATCTGAACAGAGAGATA | 3335 | TATCTCTCTGTTCAGATAA |
| 1594 | TATCTGAACAGAGAGATAT | 3336 | ATATCTCTCTGTTCAGATA |
| 1598 | TGAACAGAGAGATATAATA | 3340 | TATTATATCTCTCTGTTCA |
| 1600 | AACAGAGAGATATAATATT | 3342 | AATATTATATCTCTCTGTT |
| 1601 | ACAGAGAGATATAATATTT | 3343 | AAATATTATATCTCTCTGT |
| 1614 | ATATTTTTCCTATTGGACA | 3356 | TGTCCAATAGGAAAAATAT |
| 1616 | ATTTTTCCTATTGGACAAT | 3358 | ATTGTCCAATAGGAAAAAT |
| 1650 | CACTTCATTTTAAGAGCAA | 3392 | TTGCTCTTAAAATGAAGTG |
| 1693 | AACAGTTTTATGCTGATGA | 3435 | TCATCAGCATAAAACTGTT |
| 1703 | TGCTGATGATAATTTATCT | 3445 | AGATAAATTATCATCAGCA |
| 1044 | CCCATATGCATTAAGAGTG | 2786 | CACTCTTAATGCATATGGG |
| 1045 | CCATATGCATTAAGAGTGG | 2787 | CCACTCTTAATGCATATGG |
| 1081 | GGCAGAACCAGTACTGCAG | 2823 | CTGCAGTACTGGTTCTGCC |
| 1090 | AGTACTGCAGACTATGCCA | 2832 | TGGCATAGTCTGCAGTACT |
| 1099 | GACTATGCCATGTTCAAGG | 2841 | CCTTGAACATGGCATAGTC |
| 1100 | ACTATGCCATGTTCAAGGT | 2842 | ACCTTGAACATGGCATAGT |
| 1114 | AAGGTGGGACCTGAAGCTG | 2856 | CAGCTTCAGGTCCCACCTT |
| 1152 | TGCCTACTTCGCTGGTGGG | 2894 | CCCACCAGCGAAGTAGGCA |
| 1156 | TACTTCGCTGGTGGGGATG | 2898 | CATCCCCACCAGCGAAGTA |
| 1196 | TTGATTTTGGCGATGATCC | 2938 | GGATCATCGCCAAAATCAA |
| 1199 | ATTTTGGCGATGATCCTAG | 2941 | CTAGGATCATCGCCAAAAT |
| 1211 | ATCCTAGTGACAAGTTTTT | 2953 | AAAAACTTGTCACTAGGAT |
| 1212 | TCCTAGTGACAAGTTTTTC | 2954 | GAAAAACTTGTCACTAGGA |
| 1213 | CCTAGTGACAAGTTTTTCA | 2955 | TGAAAAACTTGTCACTAGG |
| 1218 | TGACAAGTTTTTCACATCC | 2960 | GGATGTGAAAAACTTGTCA |
| 1219 | GACAAGTTTTTCACATCCC | 2961 | GGGATGTGAAAAACTTGTC |
| 1231 | ACATCCCATAATGGCATGC | 2973 | GCATGCCATTATGGGATGT |
| 1232 | CATCCCATAATGGCATGCA | 2974 | TGCATGCCATTATGGGATG |
| 1241 | ATGGCATGCAGTTCAGTAC | 2983 | GTACTGAACTGCATGCCAT |
| 1245 | CATGCAGTTCAGTACCTGG | 2987 | CCAGGTACTGAACTGCATG |
| 1250 | AGTTCAGTACCTGGGACAA | 2992 | TTGTCCCAGGTACTGAACT |
| 1252 | TTCAGTACCTGGGACAATG | 2994 | CATTGTCCCAGGTACTGAA |
| 1269 | TGACAATGATAAGTTTGAA | 3011 | TTCAAACTTATCATTGTCA |
| 1273 | AATGATAAGTTTGAAGGCA | 3015 | TGCCTTCAAACTTATCATT |
| 1279 | AAGTTTGAAGGCAACTGTG | 3021 | CACAGTTGCCTTCAAACTT |
| 1303 | CAGGATGGATCTGGTTGGT | 3045 | ACCAACCAGATCCATCCTG |
| 1305 | GGATGGATCTGGTTGGTGG | 3047 | CCACCAACCAGATCCATCC |
| 1327 | AACAAGTGTCACGCTGGCC | 3069 | GGCCAGCGTGACACTTGTT |
| 1329 | CAAGTGTCACGCTGGCCAT | 3071 | ATGGCCAGCGTGACACTTG |
| 1334 | GTCACGCTGGCCATCTCAA | 3076 | TTGAGATGGCCAGCGTGAC |
| 1355 | GAGTTTATTACCAAGGTGG | 3097 | CCACCTTGGTAATAAACTC |
| 1357 | GTTTATTACCAAGGTGGCA | 3099 | TGCCACCTTGGTAATAAAC |
| 1363 | TACCAAGGTGGCACTTACT | 3105 | AGTAAGTGCCACCTTGGTA |
| 1364 | ACCAAGGTGGCACTTACTC | 3106 | GAGTAAGTGCCACCTTGGT |
| 1367 | AAGGTGGCACTTACTCAAA | 3109 | TTTGAGTAAGTGCCACCTT |
| 1371 | TGGCACTTACTCAAAAGCA | 3113 | TGCTTTTGAGTAAGTGCCA |
| 1388 | CATCTACTCCTAATGGTTA | 3130 | TAACCATTAGGAGTAGATG |
| 1392 | TACTCCTAATGGTTATGAT | 3134 | ATCATAACCATTAGGAGTA |
| 1424 | GGGCCACTTGGAAAACCCG | 3166 | CGGGTTTTCCAAGTGGCCC |
| 1429 | ACTTGGAAAACCCGGTGGT | 3171 | ACCACCGGGTTTTCCAAGT |
| 1430 | CTTGGAAAACCCGGTGGTA | 3172 | TACCACCGGGTTTTCCAAG |
| 1433 | GGAAAACCCGGTGGTATTC | 3175 | GAATACCACCGGGTTTTCC |
| 1471 | AAGATAATCCCATTCAACA | 3213 | TGTTGAATGGGATTATCTT |
| 1472 | AGATAATCCCATTCAACAG | 3214 | CTGTTGAATGGGATTATCT |
| 1476 | AATCCCATTCAACAGACTC | 3218 | GAGTCTGTTGAATGGGATT |
| 1486 | AACAGACTCACAATTGGAG | 3228 | CTCCAATTGTGAGTCTGTT |
| 1489 | AGACTCACAATTGGAGAAG | 3231 | CTTCTCCAATTGTGAGTCT |
| 1516 | CACCACCTGGGGGGAGCCA | 3258 | TGGCTCCCCCCAGGTGGTG |
| 1518 | CCACCTGGGGGGAGCCAAA | 3260 | TTTGGCTCCCCCCAGGTGG |
| 1524 | GGGGGGAGCCAAACAGGCT | 3266 | AGCCTGTTTGGCTCCCCCC |
| 1525 | GGGGGAGCCAAACAGGCTG | 3267 | CAGCCTGTTTGGCTCCCCC |
| 1526 | GGGGAGCCAAACAGGCTGG | 3268 | CCAGCCTGTTTGGCTCCCC |
| 1534 | AAACAGGCTGGAGACGTTT | 3276 | AAACGTCTCCAGCCTGTTT |
| 1539 | GGCTGGAGACGTTTAAAAG | 3281 | CTTTTAAACGTCTCCAGCC |
| 1593 | TTATCTGAACAGAGAGATA | 3335 | TATCTCTCTGTTCAGATAA |
| 1594 | TATCTGAACAGAGAGATAT | 3336 | ATATCTCTCTGTTCAGATA |
| 1598 | TGAACAGAGAGATATAATA | 3340 | TATTATATCTCTCTGTTCA |
| 1600 | AACAGAGAGATATAATATT | 3342 | AATATTATATCTCTCTGTT |
| 1601 | ACAGAGAGATATAATATTT | 3343 | AAATATTATATCTCTCTGT |
| 1614 | ATATTTTTCCTATTGGACA | 3356 | TGTCCAATAGGAAAAATAT |
| 1616 | ATTTTTCCTATTGGACAAT | 3358 | ATTGTCCAATAGGAAAAAT |
| 1650 | CACTTCATTTTAAGAGCAA | 3392 | TTGCTCTTAAAATGAAGTG |
| 1693 | AACAGTTTTATGCTGATGA | 3435 | TCATCAGCATAAAACTGTT |
| 1703 | TGCTGATGATAATTTATCT | 3445 | AGATAAATTATCATCAGCA |

[0393] The siRNAs in subset G have the following characteristics:
[0394] Cross-reactivity: With 19mer in human FGG mRNA, with 17mer/19mer in NHP FGG
[0395] Specificity category: For human and NHP: AS2 or better, SS3 or better
[0396] miRNA seeds: AS+SS strand: seed region not conserved in human, mouse, and rat and not present in >4 species
[0397] Off-target frequency: ≤30 human off-targets matched with 2 mismatches in antisense strand
[0398] SNPs: siRNA target sites do not harbor SNPs with a MAF≥100 (pos. 2-18)

### Example 3: Screening FGG siRNAs for Activity in Hep 3B2.1-7 Cells in Culture

[0399] Chemically modified FGG siRNAs cross reactive for at least human and non-human primates will be assayed for FGG mRNA knockdown activity in cells in culture. Hep 3B2.1-7 cells (ATCC R catalog #HB-8064) will be seeded in 96-well tissue culture plates at a cell density of 7,500 cells per well in EMEM media (VWR catalog #76000-922) supplemented with 10% fetal bovine serum and incubated overnight in a water-jacketed, humidified incubator at 37° C. in an atmosphere without supplemental carbon dioxide. The FGG siRNAs will be individually transfected into Hep 3B2.1-7 cells in duplicate wells at 1 nM and 10 nM final concentration using 0.3 μL Lipofectamine RNAiMax (Fisher, catalog #13778150) in 5 uL Opti-MEM (Thermo Fisher, catalog #31985070) per well. Silencer Select Negative Control #3 (ThermoFisher, Catalog #4392420 ID s51788) will be transfected at 1 nM and 10 nM final concentrations as a control. A positive control siRNA (ThermoFisher, Catalog #) will be transfected at 1 nM and 10 nM final concentrations. After incubation for 48 hours at 37° C., total RNA will be harvested from each well and cDNA prepared using TaqMan® Fast Advanced Cells-to-CT™ Kit (ThermoFisher, catalog #A35374) according to the manufacturer's instructions. The level of FGG mRNA from each well will be measured in triplicate by biplex real-time qPCR on a QuantStudio 6 Pro instrument (Applied Biosystems) using TaqMan Gene Expression Assay for human FGG (ThermoFisher, assay #Hs00241037_m1). The level of PPIA mRNA will be measured using TaqMan Gene Expression Assay (ThermoFisher, assay #Hs99999904_m1) and used to determine relative FGG mRNA levels in each well using the delta-delta Ct method. All data will be normalized to relative FGG mRNA levels in untreated Hep 3B2.1-7 cells. Identification of siRNAs targeting FGG that reduce FGG expression is anticipated.

### Example 4: Determining the IC50 of FGG siRNAs

[0400] The IC50 values for knockdown of FGG mRNA by select FGG siRNAs will be determined in Hep 3B2.1-7 cells. The siRNAs will be assayed individually in triplicate at 30 nM, 10 nM, 3 nM, 1 nM and 0.3 nM, 0.1 nM and 0.03 nM. Hep 3B2.1-7 cells (ATCC® catalog #HB-8064) will be seeded in 96-well tissue culture plates at a cell density of 7,500 cells per well in EMEM media (VWR catalog #76000-922) supplemented with 10% fetal bovine serum and incubated overnight in a water-jacketed, humidified incubator at 37° C. in an atmosphere without supplemental carbon dioxide. The FGG siRNAs will be individually transfected using 0.3 μL Lipofectamine RNAiMax (Fisher, catalog #13778150) in 5 uL Opti-MEM (Thermo Fisher, catalog #31985070) per well. After incubation for 48 hours at 37° C., total RNA will be harvested from each well and cDNA prepared using TaqMan® Fast Advanced Cells-to-CT™ Kit (ThermoFisher, Catalog #A35374) according to the manufacturer's instructions. The level of FGG mRNA from each well will be measured in triplicate by biplex real-time qPCR on a QuantStudio 6 Pro instrument (Applied Biosystems) using TaqMan Gene Expression Assay for human FGG (ThermoFisher, assay #Hs00241037_m1). The level of PPIA mRNA will be measured using TaqMan Gene Expression Assay (ThermoFisher, assay #Hs99999904_m1) and used to determine relative FGG mRNA levels in each well using the delta-delta Ct method. All data will be normalized to relative FGG mRNA levels in untreated Hep 3B2.1-7 cells. Curve fit will be accomplish using the [inhibitor] vs. response (three parameters) function in GraphPad Prism software.

### Example 5: ASO-Mediated Knockdown of FGG in HEPG2 Cell Line

[0401] ASOs targeted to the FGG mRNA that downregulate levels of FGG mRNA leading to a decrease in FGG secretion, when administered to the cultured human hepatocyte cell line, HepG2.

[0402] On Day 0, the HEPG2 cells are seeded at 150,000 cells/mL into a Falcon 24-well tissue culture plate (ThermoFisher Cat. No. 353047) at 0.5 mL per well.

[0403] On Day 1, the FGG ASO and negative control ASO master mixes are prepared. The FGG ASO master mix contains 350 μL of Opti-MEM (ThermoFisher Cat. No. 4427037—s1288 Lot No. AS02B02D) and 3.5 ul of a FGG ASO (10 uM stock). The negative control ASO master mix contains 350 μL of Opti-MEM and 3.5 ul of negative control ASO (ThermoFisher Cat. No. 4390843, 10 uM stock). Next, 3 μL of TransIT-X2 (Mirus Cat. No. MIR-6000) is added to each master mix. The mixes are incubated for 15 minutes to allow transfection complexes to form, then 51 ul of the appropriate master mix+TransIT-X2 is added to duplicate wells of HEPG2 cells with a final ASO concentration of 10 nM.

[0404] On Day 3, 48 hours post transfection, media is collected and mixed with protein lysis buffer containing protease and phosphatase inhibitors, and the cells are lysed using the Cells-to-Ct kit according to the manufacturer's protocol (ThermoFisher Cat. No. 4399002). For the Cells-to-Ct, cells are washed with 50 ul using cold 1×PBS and lysed by adding 49.5 ul of Lysis Solution and 0.5 ul Dnase I per well and pipetting up and down 5 times and incubating for 5 minutes at room temperature. The Stop Solution (5 ul/well) is added to each well and mixed by pipetting up and down five times and incubating at room temperature for 2 minutes. The reverse transcriptase reaction is performed using 22.5 ul of the lysate according to the manufacturer's protocol. Samples are stored at −80° C. until real-time qPCR is performed in triplicate using TaqMan Gene Expression Assays (Applied Biosystems FAM/FGG using a BioRad CFX96 Cat. No. 1855195). For the protein quantification, equivalent quantities (30-50 μg) of protein are separated by 10% SDS polyacrylamide gels and transferred to polyvinylidene fluoride membranes. Membranes are blocked with 5% nonfat milk and incubated overnight with the appropriate primary antibody at dilutions specified by the manufacturer. Next, the membranes are washed three times in TBST and incubated with the corresponding horseradish peroxidase conjugated secondary antibody at 1:5,000 dilution for 1 hr. Bound secondary antibody is detected using an enhanced chemiluminescence system. The primary immunoblotting antibody is an anti-FGG antibody (Abcam, Cambridge, UK).

[0405] A decrease in FGG mRNA expression in the HEPG2 cells is expected after transfection with the FGG ASO compared to FGG mRNA levels in HEPG2 cells transfected with the non-specific control ASO 48 hours after transfection. There is an expected decrease in the amount of FGG secreted protein, measured by quantifying the amount of FGG protein in media of HEPG2 cells transfected with the FGG ASO relative to the amount of FGG protein in media of HEPG2 cells transfected with a non-specific control ASO 48 hours after transfection. These results show that the FGG ASOs elicit knockdown of FGG mRNA in HEPG2 cells and that the decrease in FGG expression is correlated with a decrease in FGG protein secretion.

### Example 6: Determining the Activity of Species Cross-Reactive siRNAs Targeting FGG in Mice

[0406] Five groups (n=4/group) of 8 week old male ICR mice (Harlan) were utilized in this study. On Study Day −4, all animals were anesthetized and blood was collected via the submandibular vein and into tubes containing citrate for collection of plasma. Plasma fibrinogen levels were measured use the Clauss method (IDEXX Laboratories, Test #6308) and by ELISA according to the manufacturer's instructions (Molecular Innovations Catalog #MFBGNKT). On Study Day 0, Group 1 mice were injected subcutaneously with 100 μL of sterile PBS, Group 2 mice were subcutaneously injected with 200 μg of ETD01592 (sense strand SEQ ID NO: 3591; antisense strand SEQ ID NO: 3595) in 100 μL of sterile PBS, Group 3 mice were subcutaneously injected with 200 ug ETD01593 (sense strand SEQ ID NO: 3592; antisense strand SEQ ID NO: 3596) in 100 μL of sterile PBS, Group 4 mice were subcutaneously injected with 200 μg of ETD01594 (sense strand SEQ ID NO: 3593; antisense strand SEQ ID NO: 3597) in 100 uL PBS, and Group 5 mice were subcutaneously injected with 200 μg of ETD01595 (sense strand SEQ ID NO: 3594; antisense strand SEQ ID NO: 3598) in 100 uL PBS. On Study Day 10, the animals from all Groups were anesthetized, bled via cardiac puncture to collect serum and plasma, and then euthanized. A liver sample was collected from all animals and placed in RNAlater™ Stabilization Solution (Thermo Fisher, Catalog #AM7020). Serum clinical chemistry analyses were performed (IDEXX Laboratories, Test #60513) and plasma fibrinogen levels were measured as described for the Day −4 samples. The liver samples were processed in homogenization buffer (Maxwell RSC simplyRNA Tissue Kit) using Soft Tissue Homogenizing Kit CK14 (Bertin Instruments, catalog #P000933-LYSK0-A) in a Percellys 24 tissue homogenizer (Bertin Instruments) set at 5000 rpm for two 10 second cycles. Total RNA from the liver lysate was purified on a Maxwell RSC 48 platform (Promega Corporation) according to the manufacturer's recommendations. The relative level of FGG mRNA in each liver sample was assessed by RT-qPCR on a QuantStudio 6 Pro instrument (Applied Biosystems) using TaqMan assays for mouse FGG (ThermoFisher, assay #Mm00513575 ml) and the mouse housekeeping gene PPIA (ThermoFisher, assay #Mm02342430_g1), and then normalized to the mean value of the control mice (Group 1) using the delta-delta Ct method.

[0407] The results of the liver mRNA analyses are shown in Table 9. Animals treated ETD01592 (Group 2), ETD01593 (Group 3), ETD01594 (Group 4), or ETD01595 (Group 4) showed decreased liver FGG mRNA levels compared with mice injected with PBS (Group 1). The results of the plasma fibrinogen analyses are shown in Table 10. Animals treated with ETD01592 (Group 2), ETD01593 (Group 3), ETD01594 (Group 4), or ETD01595 (Group 5) showed decreased plasma fibrinogen levels as measured by the Clauss method or by ELISA compared with mice injected with PBS (Group 1). The results from the clinical chemistry indicated all the siRNAs were generally well tolerated (Table 11).

TABLE 9
Day 10 FGG mRNA liver levels in mice
treated with siRNAs targeting FGG

| | | | Relative Liver | |
|---|---|---|---|---|
| | | | FGG mRNA | |
| Group # | Treatment | Mouse # | Level | Mean |
| 1 | PBS | 1 | 0.933 | 1.00 |
| | | 2 | 1.229 | |
| | | 3 | 0.873 | |
| | | 4 | 0.998 | |
| 2 | ETD01592 | 5 | 0.098 | 0.13 |
| | | 6 | 0.165 | |
| | | 7 | 0.093 | |
| | | 8 | 0.166 | |
| 3 | ETD01593 | 9 | 0.201 | 0.22 |
| | | 10 | 0.124 | |
| | | 11 | 0.293 | |
| | | 12 | 0.316 | |
| 4 | ETD01594 | 13 | 0.148 | 0.14 |
| | | 14 | 0.121 | |
| | | 15 | 0.143 | |
| | | 16 | 0.132 | |
| 5 | ETD01595 | 17 | 0.095 | 0.16 |
| | | 18 | 0.158 | |
| | | 19 | 0.172 | |
| | | 20 | 0.27 | |

TABLE 10
Day 10 plasma fibrinogen levels in mice treated with siRNAs targeting FGG

| | | | Fibrinogen Plasma | Relative Plasma | |
|---|---|---|---|---|---|
| | | | Level (Clauss | Fibrinogen | |
| Group # | Treatment | Mouse # | method, mg/dL)* | Level (ELISA) | Mean |
| 1 | PBS | 1 | 2.840 | 1.21 | 1.00 |
| | | 2 | 3.250 | 1.04 | |
| | | 3 | 2.080 | 0.85 | |
| | | 4 | 2.550 | 0.90 | |
| 2 | ETD01592 | 5 | <LLOQ | 0.01 | 0.07 |
| | | 6 | <LLOQ | 0.10 | |
| | | 7 | <LLOQ | 0.09 | |
| | | 8 | <LLOQ | 0.07 | |
| 3 | ETD01593 | 9 | <LLOQ | 0.18 | 0.27 |
| | | 10 | <LLOQ | 0.11 | |
| | | 11 | <LLOQ | 0.52 | |
| | | 12 | 0.490 | 0.27 | |
| 4 | ETD01594 | 13 | <LLOQ | 0.13 | 0.14 |
| | | 14 | <LLOQ | 0.11 | |
| | | 15 | <LLOQ | 0.13 | |
| | | 16 | <LLOQ | 0.20 | |
| 5 | ETD01595 | 17 | <LLOQ | 0.20 | 0.23 |
| | | 18 | <LLOQ | 0.16 | |
| | | 19 | <LLOQ | 0.16 | |
| | | 20 | <LLOQ | 0.39 | |

*Clauss method LLOQ <0.5 mg/dL

TABLE 11
Clinical chemistry results after injection of mice with 200 ug of
ETD01592, ETD01593, ETD01594 or ETD01595

| Group | | Mouse | ALP | AST | ALT | BUN | CREAT |
|---|---|---|---|---|---|---|---|
| # | Treatment | # | (U/L) | (U/L) | (U/L) | (mg/dL) | (mg/dL) |
| 1 | PBS | 1 | 79 | 122 | 42 | 31 | 0.2 |
| | | 2 | 91 | 61 | 39 | 25 | 0.2 |
| | | 3 | 64 | 141 | 66 | 34 | 0.2 |
| | | 4 | 86 | 309 | 152 | 32 | 0 |
| 2 | ETD01592 | 5 | 69 | 157 | 47 | 27 | 0.2 |
| | | 6 | 74 | 90 | 76 | 29 | 0.2 |
| | | 7 | 51 | 83 | 38 | 26 | 0.2 |
| | | 8 | 102 | 91 | 40 | 27 | 0.2 |
| 3 | ETD01593 | 9 | 100 | 174 | 46 | 29 | 0.2 |
| | | 10 | 74 | 185 | 84 | 25 | 0.1 |
| | | 11 | 103 | 78 | 63 | 27 | 0.2 |
| | | 12 | 98 | 41 | 22 | 22 | 0.2 |
| 4 | ETD01594 | 13 | 111 | 333 | 177 | 32 | 0.1 |
| | | 14 | 61 | 53 | 22 | 27 | 0.2 |
| | | 15 | 57 | 102 | 48 | 32 | 0.2 |
| | | 16 | 105 | 486 | 107 | 28 | 0.2 |
| 5 | ETD01595 | 17 | 114 | 129 | 43 | 33 | 0.2 |
| | | 18 | 86 | 145 | 71 | 29 | 0.1 |
| | | 19 | 80 | 170 | 95 | 28 | 0 |
| | | 20 | 102 | 79 | 34 | 28 | 0.2 |

### Example 7: Determining the Activity of siRNAs Targeting FGG in Mice at Low Dose Levels

[0408] Nine groups (n=3/group) of 8 week old male ICR mice (Harlan) were utilized in this study. On Study Day 0, mice in Group 1 were injected subcutaneously with 100 μL of sterile PBS, mice in Groups 2 and 3 were subcutaneously injected with 20 μg or 60 μg of ETD01592, respectively (sense strand SEQ ID NO: 3591; antisense strand SEQ ID NO: 3595) in 100 μL of sterile PBS, mice in Groups 4 and 5 were subcutaneously injected with 20 μg or 60 μg of ETD01593, respectively (sense strand SEQ ID NO: 3592; antisense strand SEQ ID NO: 3596) in 100 μL of sterile PBS, mice in Groups 6 and 7 were subcutaneously injected with 20 μg or 60 μg of ETD01594, respectively (sense strand SEQ ID NO: 3593; antisense strand SEQ ID NO: 3597) in 100 uL PBS, and mice in Groups 8 and 9 were subcutaneously injected with 20 μg or 60 μg of ETD01595, respectively (sense strand SEQ ID NO: 3594; antisense strand SEQ ID NO: 3598) in 100 uL PBS. On Study Day 10, the animals from all groups were anesthetized, bled via cardiac puncture to collect serum and plasma, and then euthanized. A liver sample was collected from all animals and placed in RNAlater™ Stabilization Solution (Thermo Fisher, Catalog #AM7020). Plasma fibrinogen levels were measured by ELISA according to the manufacturer's instructions (Molecular Innovations Catalog #MFBGNKT). Plasma prothrombin time (PT) and activated partial thromboplastin time (aPTT) (IDEXX Laboratories, Test #6308) and serum clinical chemistry measurements were also performed (IDEXX Laboratories, Test #60513). The liver samples were processed in homogenization buffer (Maxwell RSC simplyRNA Tissue Kit) using Soft Tissue Homogenizing Kit CK14 (Bertin Instruments, catalog #P000933-LYSK0-A) in a Percellys 24 tissue homogenizer (Bertin Instruments) set at 5000 rpm for two 10 second cycles. Total RNA from the liver lysate was purified on a Maxwell RSC 48 platform (Promega Corporation) according to the manufacturer's recommendations. The relative level of FGG mRNA in each liver sample was assessed by RT-qPCR on a QuantStudio 6 Pro instrument (Applied Biosystems) using TaqMan assays for mouse FGG (ThermoFisher, assay #Mm00513575 ml) and the mouse housekeeping gene PPIA (ThermoFisher, assay #Mm02342430_g1), and then normalized to the mean value of the control mice (Group 1) using the delta-delta Ct method.

[0409] The results of the liver mRNA analyses are shown in Table 12. Animals treated with 20 ug ETD01592, ETD01593, ETD01594, or ETD01595 showed decreased liver FGG mRNA levels compared with mice injected with PBS. Animals treated with 60 ug ETD01592, ETD01593, ETD01594, or ETD1595 showed decreased liver FGG mRNA levels compared with mice injected with 20 ug of those siRNAs or with mice injected with PBS. The results of the plasma fibrinogen ELISA are shown in Table 13. Animals treated with 20 ug ETD01592, ETD01593, ETD01594, or ETD01595 showed decreased plasma fibrinogen protein levels compared with mice injected with PBS. Animals treated with 60 ug ETD01592, ETD01593, ETD01594, or ETD01595 showed decreased plasma fibrinogen protein levels compared with mice injected with 20 μg of those siRNAs or with mice injected with PBS. The results of the PT and aPTT measurements in animals treated with 20 ug and 60 ug ETD01592, ETD01593, ETD01594, or ETD01595 are shown in Table 14. The results from the clinical chemistry indicate that all the siRNAs were generally well tolerated at these dose levels (Table 15).

TABLE 12
FGG mRNA liver levels in mice treated with 20 ug or
60 ug of ETD01592, ETD01593, ETD01594 or ETD01595.

| | | | | Relative Liver | |
|---|---|---|---|---|---|
| | | Dose | | FGG mRNA | |
| Group # | Treatment | Level | Mouse # | Level | Mean |
| 1 | PBS | NA | 1 | 0.97 | 1.00 |
| | | | 2 | 1.07 | |
| | | | 3 | 0.97 | |
| 2 | ETD01592 | 20 ug | 4 | 0.90 | 0.80 |
| | | | 5 | 0.58 | |
| | | | 6 | 0.93 | |
| 3 | ETD01592 | 60 ug | 7 | 0.36 | 0.54 |
| | | | 8 | 0.57 | |
| | | | 9 | 0.70 | |
| 4 | ETD01593 | 20 ug | 10 | 1.10 | 1.12 |
| | | | 11 | 0.87 | |
| | | | 12 | 1.38 | |
| 5 | ETD01593 | 60 ug | 13 | 0.61 | 0.54 |
| | | | 14 | 0.42 | |
| | | | 15 | 0.58 | |
| 6 | ETD01594 | 20 ug | 16 | 0.69 | 0.78 |
| | | | 17 | 0.65 | |
| | | | 18 | 1.00 | |
| 7 | ETD01594 | 60 ug | 19 | 0.29 | 0.26 |
| | | | 20 | 0.36 | |
| | | | 21 | 0.11 | |
| 8 | ETD01595 | 20 ug | 22 | 0.64 | 0.86 |
| | | | 23 | 0.84 | |
| | | | 24 | 1.11 | |
| 9 | ETD01595 | 60 ug | 25 | 0.60 | 0.63 |
| | | | 26 | 0.58 | |
| | | | 27 | 0.71 | |

TABLE 13
Plasma fibrinogen levels in mice treated with 20 ug
or 60 ug of ETD01592, ETD01593, ETD01594 or ETD01595.

| | | | | Relative Plasma | |
|---|---|---|---|---|---|
| | | Dose | | Fibrinogen | |
| Group # | Treatment | Level | Mouse # | Level (ELISA) | Mean |
| 1 | PBS | NA | 1 | 1.38 | 1.00 |
| | | | 2 | 1.00 | |
| | | | 3 | 0.62 | |
| 2 | ETD01592 | 20 ug | 4 | 0.83 | 0.61 |
| | | | 5 | 0.51 | |
| | | | 6 | 0.49 | |
| 3 | ETD01592 | 60 ug | 7 | 0.13 | 0.20 |
| | | | 8 | 0.21 | |
| | | | 9 | 0.27 | |
| 4 | ETD01593 | 20 ug | 10 | 0.53 | 0.54 |
| | | | 11 | 0.54 | |
| | | | 12 | 0.55 | |
| 5 | ETD01593 | 60 ug | 13 | 0.32 | 0.30 |
| | | | 14 | 0.46 | |
| | | | 15 | 0.11 | |
| 6 | ETD01594 | 20 ug | 16 | 0.50 | 0.28 |
| | | | 17 | 0.29 | |
| | | | 18 | 0.04 | |
| 7 | ETD01594 | 60 ug | 19 | 0.23 | 0.15 |
| | | | 20 | 0.20 | |
| | | | 21 | 0.03 | |
| 8 | ETD01595 | 20 ug | 22 | 0.63 | 0.58 |
| | | | 23 | 0.64 | |
| | | | 24 | 0.47 | |
| 9 | ETD01595 | 60 ug | 25 | 0.45 | 0.45 |
| | | | 26 | 0.39 | |
| | | | 27 | 0.51 | |

TABLE 14
PTT and aPTT in mice treated with 20 ug or 60 ug of
ETD01592, ETD01593, ETD01594 or ETD01595.

| Group | | Dose | Mouse | PT | Mean | aPTT | Mean |
|---|---|---|---|---|---|---|---|
| # | Treatment | Level | # | (s) | (s) | (s) | (s) |
| 1 | PBS | NA | 1 | 11.6 | 11.4 | 23.9 | 28.0 |
| | | | 2 | 11.3 | | 33.6 | |
| | | | 3 | 11.3 | | 26.4 | |
| 2 | ETD01592 | 20 ug | 4 | 11.7 | 11.6 | 26.1 | 29.7 |
| | | | 5 | 11.5 | | 33.8 | |
| | | | 6 | 11.6 | | 29.2 | |
| 3 | ETD01592 | 60 ug | 7 | 14.1 | 13.4 | 22.5 | 24.8 |
| | | | 8 | 13.3 | | 25.9 | |
| | | | 9 | 12.8 | | 26 | |
| 4 | ETD01593 | 20 ug | 10 | 11.7 | 12.1 | 30.6 | 32.0 |
| | | | 11 | 12.1 | | 24.2 | |
| | | | 12 | 12.5 | | 41.3 | |
| 5 | ETD01593 | 60 ug | 13 | 11.4 | 12.8 | 20.3 | 33.3 |
| | | | 14 | 12.3 | | 50.9 | |
| | | | 15 | 14.8 | | 28.8 | |
| 6 | ETD01594 | 20 ug | 16 | 11.3 | 15.3 | 25.8 | 27.9 |
| | | | 17 | 12.2 | | 27.8 | |
| | | | 18 | 22.3 | | 30.1 | |
| 7 | ETD01594 | 60 ug | 19 | 17.6 | 19.8 | 23.9 | 47.2 |
| | | | 20 | 13.2 | | 26.4 | |
| | | | 21 | 28.5 | | 91.3 | |
| 8 | ETD01595 | 20 ug | 22 | 11.6 | 11.8 | 19.5 | 23.4 |
| | | | 23 | 12.7 | | 30.8 | |
| | | | 24 | 10.9 | | 19.9 | |
| 9 | ETD01595 | 60 ug | 25 | 11.7 | 11.9 | 21.4 | 25.8 |
| | | | 26 | 11.4 | | 29.4 | |
| | | | 27 | 12.5 | | 26.5 | |

TABLE 15
Clinical chemistry results after injection of mice with 20 ug or
60 ug of ETD01592, ETD01593, ETD01594 or ETD01595.

| | | | | | | | BUN | CREAT |
|---|---|---|---|---|---|---|---|---|
| Group | | Dose | Mouse | ALP | AST | ALT | (mg/ | (mg/ |
| # | Treatment | Level | # | (U/L) | (U/L) | (U/L) | dL) | dL) |
| 1 | PBS | NA | 1 | 77 | 83 | 32 | 22 | 0.1 |
| | | | 2 | 109 | 70 | 27 | 21 | 0.2 |
| | | | 3 | 118 | 65 | 30 | 22 | 0.1 |
| 2 | ETD01592 | 20 ug | 4 | 138 | 54 | 26 | 24 | 0.1 |
| | | | 5 | 93 | 55 | 26 | 25 | 0.1 |
| | | | 6 | 107 | 124 | 54 | 22 | 0.1 |
| 3 | ETD01592 | 60 ug | 7 | 100 | 67 | 25 | 18 | 0.1 |
| | | | 8 | 105 | 56 | 24 | 20 | 0.1 |
| | | | 9 | 69 | 64 | 23 | 19 | 0.1 |
| 4 | ETD01593 | 20 ug | 10 | 71 | 174 | 89 | 25 | 0.1 |
| | | | 11 | 99 | 67 | 31 | 22 | 0.1 |
| | | | 12 | 117 | 146 | 70 | 23 | 0.2 |
| 5 | ETD01593 | 60 ug | 13 | 110 | 69 | 30 | 27 | 0.2 |
| | | | 14 | 133 | 100 | 30 | 24 | 0.2 |
| | | | 15 | 119 | 46 | 26 | 31 | 0.1 |
| 6 | ETD01594 | 20 ug | 16 | 124 | 51 | 26 | 22 | 0.1 |
| | | | 17 | 126 | 235 | 158 | 24 | 0.1 |
| | | | 18 | 171 | 90 | 38 | 24 | 0.2 |
| 7 | ETD01594 | 60 ug | 19 | 72 | 54 | 32 | 20 | 0.1 |
| | | | 20 | 100 | 56 | 35 | 23 | 0.2 |
| | | | 21 | 114 | 135 | 50 | 31 | 0.2 |
| 8 | ETD01595 | 20 ug | 22 | 120 | 77 | 38 | 22 | 0.1 |
| | | | 23 | 93 | 387 | 102 | 28 | 0.2 |
| | | | 24 | 94 | 144 | 130 | 19 | 0.2 |
| 9 | ETD01595 | 60 ug | 25 | 93 | 72 | 23 | 21 | 0.1 |
| | | | 26 | 136 | 72 | 57 | 18 | 0.1 |
| | | | 27 | 135 | 51 | 22 | 25 | 0.2 |

### Example 8: Inhibition of FGG in a Mouse Model for Depression Using Modified FGG siRNAs or ASOs

[0410] In this experiment, a mouse model of depression is used to evaluate the effect of siRNA or ASO-mediated inhibition of FGG. To induce depression like symptoms the mice will be subjected to Chronic Social Defeat (CSD) by repeated social confrontations with an aggressive mouse for 15 consecutive days. Depression like symptoms are measured using Open Field Test, elevated T-maze and Tail Suspension Test.

[0411] Briefly, C57Bl/6J mice (Charles River, MA USA) are divided into six groups: Group 1—a group treated with non-targeting control siRNA, Group 2—a group treated with non-targeting control ASO, Group 3—a group treated with FGG siRNA, Group 4—a group treated with FGG ASO, Group 5—a group treated with vehicle, Group 6—a group not subjected to chronic social defeat, treated with vehicle. Each group contains 20 male mice.

[0412] Administration of siRNA or ASO is achieved with a 100 ul subcutaneous injection of naked siRNA or ASO resuspended at concentration of 10 mg/mL in PBS. On Study Days 0, 7 and 21, Group 1 mice will be injected subcutaneously with non-targeting control siRNA, Group 2 mice will be injected subcutaneously with non-targeting control ASO, Group 3 mice will be injected subcutaneously with siRNA targeting mouse FGG, Group 4 mice will be injected subcutaneously with ASO targeting mouse FGG, and Group 5 and Group 6 mice will be injected subcutaneously with PBS.

[0413] All mice from groups 1-5 are exposed to CD-1/ICR mice (Charles River, MA USA), that have been previously screened for exhibiting aggressive behavior, for 15 days total beginning on Study Day 14. The behavioral tests are performed in Groups 1-5, 8 days after the final injection (Study Day 29).

[0414] Mice are first evaluated using the open field paradigm (44×44×40 cm) in a sound-attenuated room. The total distance (cm) traveled by each mouse is recorded for 5 min by a video surveillance system (SMART; Panlab SL, Barcelona, Spain) and is used to quantify activity levels. The floor of the open-field apparatus is cleaned with 10% ethanol between tests.

[0415] The elevated T-maze is a behavioral test useful for screening potential antidepressant drugs and assessing other manipulations that are expected to affect anxiety related behaviors. Mice are placed individually in an apparatus that consists of three elevated arms, one enclosed and two open. Mice will be initially placed in the enclosed arm of the maze and the time taken to leave the enclosed arm in three consecutive trials is measured. The total time in enclosed is recorded as an index of anxiety-like behavior.

[0416] The tail suspension test is a behavioral test useful for screening potential antidepressant drugs and assessing other manipulations that are expected to affect depression related behaviors. Mice are suspended by their tail, without the ability to escape or reach the sides of the enclosure. During the duration of the test, 6 minutes, the mouse's escape-oriented behaviors will be quantified as well as time spend immobile. The total time spent attempting to escape versus time spent immobile is recorded as an index of depressive-like behavior.

[0417] 24 hours after the behavioral assessment, the mice are sacrificed by cervical dislocation following an intraperitoneal injection of 0.3 ml Nembutal (5 mg/ml) (Sigma Cat. No. 1507002). A liver sample will be collected from all animals and placed in RNAlater™ Stabilization Solution (Thermo Fisher, Catalog #AM7020). The liver samples will be processed in homogenization buffer (Maxwell RSC simplyRNA Tissue Kit) using Soft Tissue Homogenizing Kit CK14 (Bertin Instruments, catalog #P000933-LYSK0-A) in a Percellys 24 tissue homogenizer (Bertin Instruments) set at 5000 rpm for two 10 second cycles. Total RNA from the liver lysate was purified on a Maxwell RSC 48 platform (Promega Corporation) according to the manufacturer's recommendations. The relative level of FGG mRNA in each liver sample was assessed by RT-qPCR on a QuantStudio 6 Pro instrument (Applied Biosystems) using TaqMan assays for mouse FGG (ThermoFisher, assay #Mm00513575_m1) and the mouse housekeeping gene PPIA (ThermoFisher, assay #Mm02342430_g1), and then normalized to the mean value of the control mice using the delta-delta Ct method. Plasma fibrinogen levels will be measured use the Clauss method or by ELISA according to the manufacturer's instructions (Molecular Innovations Catalog #MFBGNKT).

[0418] A decrease in FGG mRNA expression in the liver tissue from mice dosed with the FGG siRNA or ASO is expected compared to FGG mRNA levels in the liver tissue from mice dosed with the non-specific controls. Measurement of plasma fibrinogen levels is expected to show a decrease in fibrinogen in the mice dosed with the FGG siRNA or ASO compared to fibrinogen from the plasma from mice dosed with non-specific control. There is an expected decrease in the time before the mice leave the enclosed arm of the elevated T-maze as well in a decrease in time spent in the enclosed arm in mice that receive the FGG siRNA or ASO compared to mice that receive non-specific control. In addition, there is an expected decrease in total immobility time in the tail suspension test along with no change in locomotor activity in the open field test in mice that receive the FGG siRNA or ASO compared to mice that receive non-specific control.

### Example 9: Inhibition of FGG in a Mouse Model for Alzheimer's Disease Using FGG siRNAs or ASOs

[0419] In this experiment, a mouse model of Alzheimer's disease using 5×FAD mice which express human APP and PSEN1 transgenes with a total of five AD-linked mutations is used to evaluate the effect of siRNA or ASO inhibition of FGG. Cognitive function is measured using a contextual fear conditioning (CFC).

[0420] Briefly, 7-month-old 5×FAD mice are divided into five groups: Group 1—a group treated with non-targeting control siRNA, Group 2—a group treated with non-targeting control ASO, Group 3—a group treated with FGG siRNA1, Group 4—a group treated with FGG ASO1, Group 5—a group treated with vehicle. Each group contains 20 mice.

[0421] Administration of siRNA or ASO is achieved with a 100 ul subcutaneous injection of GalNAc-conjugated siRNA or ASO at concentration of 10 mg/mL in PBS. On Study Days 0, 7 and 14, Group 1 mice will be injected subcutaneously with non-targeting control siRNA, Group 2 mice will be injected subcutaneously with non-targeting control ASO, Group 3 mice will be injected subcutaneously with siRNA1 targeting mouse FGG, Group 4 mice will be injected subcutaneously with ASO1 targeting mouse FGG, and Group 5 mice will be injected subcutaneously with vehicle. The behavioral tests are performed 7 days after the final injection.

[0422] To rule out nonspecific motor effects that could influence the results of the cognitive function tests, the potential effect of siRNA or ASO treatment on locomotor activity is assessed. Mice are evaluated using the openfield paradigm (44×44×40 cm) in a sound-attenuated room. The total distance (cm) traveled by each mouse is recorded for 5 min by a video surveillance system (SMART; Panlab SL, Barcelona, Spain) and is used to quantify activity levels. The floor of the open-field apparatus is cleaned with 10% ethanol between tests.

[0423] Mice are then evaluated using the contextual fear conditioning (CFC) and active avoidance (AA) paradigms. Mice are subjected to repeated electric shock stimuli in a sound-attenuated room over multiple trials. The freezing and avoidance behaviors are recorded for each trial by a video surveillance system (SMART; Panlab SL, Barcelona, Spain) and are used to quantify freezing time and avoidance. The floor of the apparatus is cleaned with 10% ethanol between tests.

[0424] 24 hours after the behavioral assessment, the mice are sacrificed by cervical dislocation following an intraperitoneal injection of 0.3 ml Nembutal (5 mg/ml) (Sigma Cat. No. 1507002). A liver sample will be collected from all animals and placed in RNAlater™ Stabilization Solution (Thermo Fisher, Catalog #AM7020). The liver samples will be processed in homogenization buffer (Maxwell RSC simplyRNA Tissue Kit) using Soft Tissue Homogenizing Kit CK14 (Bertin Instruments, catalog #P000933-LYSK0-A) in a Percellys 24 tissue homogenizer (Bertin Instruments) set at 5000 rpm for two 10 second cycles. Total RNA from the liver lysate was purified on a Maxwell RSC 48 platform (Promega Corporation) according to the manufacturer's recommendations. The relative level of FGG mRNA in each liver sample was assessed by RT-qPCR on a QuantStudio 6 Pro instrument (Applied Biosystems) using TaqMan assays for mouse FGG (ThermoFisher, assay #Mm00513575_m1) and the mouse housekeeping gene PPIA (ThermoFisher, assay #Mm02342430_g1), and then normalized to the mean value of the control mice using the delta-delta Ct method. Plasma fibrinogen levels will be measured use the Clauss method or by ELISA according to the manufacturer's instructions (Molecular Innovations Catalog #MFBGNKT).

[0425] A decrease in FGG mRNA expression in the liver tissue from mice dosed with the FGG siRNA or ASO is expected compared to FGG mRNA levels in the liver tissue from mice dosed with the non-specific controls. Measurement of plasma fibrinogen levels is expected to show a decrease in fibrinogen in the mice dosed with the FGG siRNA or ASO compared to fibrinogen from the plasma from mice dosed with non-specific control. There is an expected decrease in freezing time in the CFC and increase in the avoidance behaviors in the AA in mice that receive the FGG siRNA or ASO compared to mice that receive the non-specific controls along with no change between treatment groups in the locomotor activity test.

### Example 10: Screening FGG siRNAs for Activity in Huh7 Cells in Culture

[0426] Chemically modified FGG siRNAs cross-reactive for at least human and non-human primates were assayed for FGG mRNA knockdown activity in cells in culture. Huh7 cells (Xenotech catalog #JCRB0403) were seeded in 96-well tissue culture plates at a cell density of 20,000 cells per well in DMEM media (VWR catalog #02-0100-0500) supplemented with 10% fetal bovine serum and incubated overnight in a water-jacketed, humidified incubator at 37° C. in an atmosphere containing 5% carbon dioxide. The FGG siRNAs were individually transfected into Huh7 cells in duplicate wells at 1 nM and 10 nM final concentration using 0.2 μL Lipofectamine RNAiMax (Fisher, catalog #13778150) in 5 uL Opti-MEM (Thermo Fisher, catalog #31985070) per well. Silencer Select Negative Control #1 (ThermoFisher, catalog #4390843) was transfected at 1 nM and 10 nM final concentrations as a negative control. Positive control siRNAs targeting FGG (ThermoFisher, catalog #4392420, Assay IDs s5179, s5180) were transfected at 1 nM and 10 nM final concentrations. After incubation for 48 hours at 37° C., total RNA was harvested from each well using TaqMan® Fast Advanced Cells-to-CT™ Kit (ThermoFisher, catalog #A35374) according to the manufacturer's instructions. Preparation of cDNA was performed using Quanta qScript cDNA SuperMix (VWR, Catalog #95048-500) according to the manufacturer's instructions. The level of FGG mRNA from each well was measured in triplicate by biplex real-time qPCR on a QuantStudio 6 Pro instrument (Applied Biosystems) using TaqMan® Fast Advanced Master Mix (Fisher Scientific catalog #44-445-58), TaqMan Gene Expression Assay for human FGG (ThermoFisher, assay #Hs00241037_m1) and TaqMan Gene Expression Assay for human PPIA (ThermoFisher, assay #Hs99999904_m1). The relative FGG mRNA levels in each well was calculated using the delta-delta Ct method. All data were normalized to relative FGG mRNA levels in untreated Huh7 cells. Results are shown in Table 16.

TABLE 16
Knockdown activity of FGG-specific siRNAs
at 1 nM and 10 nM in Huh7 cells

| | | | Relative Activity | |
|---|---|---|---|---|
| Untreated Cells | — | — | 1.00 | |
| siRNA | Sense Strand | Antisense Strand | 10 nM | 1 nM |
| name | SEQ ID NO | SEQ ID NO | siRNA | siRNA |
| Neg. Ctrl siRNA | — | — | 0.96 | 1.00 |
| Pos. Ctrl siRNA-1 | — | — | 0.09 | 0.34 |
| Pos. Ctrl siRNA-2 | — | — | 0.13 | 0.58 |
| ETD01663 | 3485 | 3538 | 0.19 | 0.51 |
| ETD01664 | 3486 | 3539 | 0.21 | 0.56 |
| ETD01665 | 3487 | 3540 | 0.18 | 0.41 |
| ETD01666 | 3488 | 3541 | 0.15 | 0.66 |
| ETD01667 | 3489 | 3542 | 0.64 | 0.87 |
| ETD01668 | 3490 | 3543 | 0.32 | 0.66 |
| ETD01669 | 3491 | 3544 | 0.39 | 0.63 |
| ETD01670 | 3492 | 3545 | 0.10 | 0.47 |
| ETD01671 | 3493 | 3546 | 0.65 | 0.73 |
| ETD01672 | 3494 | 3547 | 0.36 | 0.98 |
| ETD01673 | 3495 | 3548 | 0.46 | 0.80 |
| ETD01674 | 3496 | 3549 | 0.26 | 0.92 |
| ETD01675 | 3497 | 3550 | 0.48 | 0.86 |
| ETD01676 | 3498 | 3551 | 0.49 | 0.92 |
| ETD01677 | 3499 | 3552 | 0.35 | 0.89 |
| ETD01678 | 3500 | 3553 | 0.36 | 0.69 |
| ETD01679 | 3501 | 3554 | 0.44 | 0.95 |
| ETD01680 | 3502 | 3555 | 0.31 | 0.96 |
| ETD01681 | 3503 | 3556 | 0.26 | 0.71 |
| ETD01682 | 3504 | 3557 | 0.70 | 0.97 |
| ETD01683 | 3505 | 3558 | 0.32 | 0.87 |
| ETD01684 | 3506 | 3559 | 0.52 | 0.87 |
| ETD01685 | 3507 | 3560 | 0.27 | 0.87 |
| ETD01686 | 3508 | 3561 | 0.14 | 0.51 |
| ETD01687 | 3509 | 3562 | 0.47 | 0.85 |
| ETD01688 | 3510 | 3563 | 0.45 | 0.94 |
| ETD01689 | 3511 | 3564 | 0.97 | 0.74 |
| ETD01690 | 3512 | 3565 | 0.32 | 0.90 |
| ETD01691 | 3513 | 3566 | 0.52 | 0.98 |
| ETD01692 | 3514 | 3567 | 0.47 | 0.89 |
| ETD01693 | 3515 | 3568 | 0.42 | 0.92 |
| ETD01694 | 3516 | 3569 | 0.05 | 0.50 |
| ETD01695 | 3517 | 3570 | 0.57 | 0.84 |
| ETD01696 | 3518 | 3571 | 0.27 | 0.97 |
| ETD01697 | 3519 | 3572 | 0.20 | 0.65 |
| ETD01698 | 3520 | 3573 | 0.25 | 1.12 |
| ETD01699 | 3521 | 3574 | 0.39 | 0.95 |
| ETD01700 | 3522 | 3575 | 0.34 | 0.89 |
| ETD01701 | 3523 | 3576 | 0.16 | 0.84 |
| ETD01702 | 3524 | 3577 | 0.33 | 0.63 |
| ETD01703 | 3525 | 3578 | 0.19 | 0.52 |
| ETD01704 | 3526 | 3579 | 0.25 | 0.88 |
| ETD01705 | 3527 | 3580 | 0.31 | 0.79 |
| ETD01706 | 3528 | 3581 | 0.99 | 1.02 |
| ETD01707 | 3529 | 3582 | 0.26 | 0.89 |
| ETD01708 | 3530 | 3583 | 0.80 | 0.75 |
| ETD01709 | 3531 | 3584 | 0.26 | 0.81 |
| ETD01710 | 3532 | 3585 | 0.17 | 0.64 |
| ETD01711 | 3533 | 3586 | 0.44 | 0.41 |
| ETD01712 | 3534 | 3587 | 0.46 | 0.64 |
| ETD01713 | 3535 | 3588 | 0.23 | 0.68 |
| ETD01714 | 3536 | 3589 | 0.45 | 0.80 |
| ETD01715 | 3537 | 3590 | 0.45 | 0.94 |

### Example 11: Determining the IC50 of FGG siRNAs in Huh7 Cells in Culture

[0427] The IC50 values for knockdown of FGG mRNA by select FGG siRNAs were determined in Huh7 cells. The siRNAs were assayed individually in triplicate at 30 nM, 10 nM, 3 nM, 1 nM and 0.3 nM, 0.1 nM and 0.03 nM. Huh7 cells (Xenotech catalog #JCRB0403) were seeded in 96-well tissue culture plates at a cell density of 20,000 cells per well in DMEM media (VWR catalog #02-0100-0500) supplemented with 10% fetal bovine serum and incubated overnight in a water-jacketed, humidified incubator at 37° C. in an atmosphere supplemented with 5% carbon dioxide. The FGG siRNAs will be individually transfected using 0.2 μL Lipofectamine RNAiMax (Fisher, catalog #13778150) in 5 uL Opti-MEM (Thermo Fisher, catalog #31985070) per well. The positive control siRNA targeting FGG (ThermoFisher, catalog #4392420, Assay ID s5179) was included as a comparator. After incubation for 48 hours at 37° C., total RNA was harvested from each well using TaqMan® Fast Advanced Cells-to-CT™ Kit (ThermoFisher, catalog #A35374) according to the manufacturer's instructions. Preparation of cDNA was performed using Quanta qScript cDNA SuperMix (VWR, Catalog #95048-500) according to the manufacturer's instructions. The level of FGG mRNA from each well was measured in triplicate by biplex real-time qPCR on a QuantStudio 6 Pro instrument (Applied Biosystems) using TaqMan® Fast Advanced Master Mix (Fisher Scientific catalog #44-445-58), TaqMan Gene Expression Assay for human FGG (ThermoFisher, assay #Hs00241037_m1) and TaqMan Gene Expression Assay for human PPIA (ThermoFisher, assay #Hs99999904_m1). The relative FGG mRNA levels in each well was calculated using the delta-delta Ct method. All data were normalized to relative FGG mRNA levels in untreated Huh7 cells. Curve fit was accomplish using the [inhibitor] vs. response (three parameters) function in GraphPad Prism software. Results are shown in Table 17.

TABLE 17
IC50 Values of FGG siRNAs in Human Huh7 Cells

| | | | Relative FGG | |
|---|---|---|---|---|
| Untreated Cells | | | mRNA Levels | |
| siRNA | [siRNA] | | 1.00 | IC50 (nM) |
| Pos. Ctrl siRNA-1 | 30 | nM | 0.16 | 5.6 |
| | 10 | nM | 0.35 | |
| | 3 | nM | 0.41 | |
| | 1 | nM | 0.81 | |
| | 0.3 | nM | 0.83 | |
| | nM | | 0.64 | |
| | 0.03 | nM | | |
| ETD01663 | 30 | nM | 0.49 | 20.3 |
| | 10 | nM | 0.87 | |
| | 3 | nM | 1.05 | |
| | 1 | nM | 1.34 | |
| | 0.3 | nM | 1.42 | |
| | 0.1 | nM | 1.10 | |
| | 0.03 | nM | 1.32 | |
| ETD01665 | 30 | nM | 0.43 | 1.9 |
| | 10 | nM | 0.53 | |
| | 3 | nM | 0.77 | |
| | 1 | nM | 0.99 | |
| | 0.3 | nM | 1.16 | |
| | 0.1 | nM | 1.04 | |
| | 0.03 | nM | 1.49 | |
| ETD01666 | 30 | nM | 0.28 | 17.0 |
| | 10 | nM | 0.68 | |
| | 3 | nM | 1.02 | |
| | 1 | nM | 1.23 | |
| | 0.3 | nM | 1.29 | |
| | 0.1 | nM | 0.84 | |
| | 0.03 | nM | 1.54 | |
| ETD01670 | 30 | nM | 0.33 | 15.6 |
| | 10 | nM | 0.87 | |
| | 3 | nM | 1.11 | |
| | 1 | nM | 1.15 | |
| | 0.3 | nM | 1.41 | |
| | 0.1 | nM | 1.33 | |
| | 0.03 | nM | 1.60 | |
| ETD01686 | 30 | nM | 0.29 | 4.9 |
| | 10 | nM | 0.72 | |
| | 3 | nM | 1.07 | |
| | 1 | nM | 1.44 | |
| | 0.3 | nM | 1.72 | |
| | 0.1 | nM | 1.85 | |
| | 0.03 | nM | 1.59 | |
| ETD01694 | 30 | nM | 0.47 | 21.1 |
| | 10 | nM | 1.10 | |
| | 3 | nM | 1.31 | |
| | 1 | nM | 1.63 | |
| | 0.3 | nM | 1.88 | |
| | 0.1 | nM | 1.64 | |
| | 0.03 | nM | 1.61 | |
| ETD01697 | 30 | nM | 0.39 | 6.6 |
| | 10 | nM | 1.14 | |
| | 3 | nM | 1.18 | |
| | 1 | nM | 1.81 | |
| | 0.3 | nM | 2.07 | |
| | 0.1 | nM | 2.04 | |
| | 0.03 | nM | 1.89 | |
| ETD01701 | 30 | nM | 0.45 | 30.4 |
| | 10 | nM | 1.12 | |
| | 3 | nM | 1.62 | |
| | 1 | nM | 1.76 | |
| | 0.3 | nM | 1.88 | |
| | 0.1 | nM | 1.68 | |
| | 0.03 | nM | 1.88 | |
| ETD01703 | 30 | nM | 0.29 | 25.8 |
| | 10 | nM | 0.66 | |
| | 3 | nM | 0.87 | |
| | 1 | nM | 1.45 | |
| | 0.3 | nM | 1.00 | |
| | 0.1 | nM | 1.00 | |
| | 0.03 | nM | 1.09 | |
| ETD01710 | 30 | nM | 0.17 | 4.2 |
| | 10 | nM | 0.44 | |
| | 3 | nM | 0.70 | |
| | 1 | nM | 0.91 | |
| | 0.3 | nM | 1.09 | |
| | 0.1 | nM | 1.16 | |
| | 0.03 | nM | 1.16 | |

### Example 12. Optimization of siRNAs Targeting Human, Cynomolgous Monkey, Rat and Mouse FGG in Mice

[0428] Several siRNAs designed to be cross-reactive with human, cynomolgous monkey and mouse FGG mRNA were tested for activity in mice. The siRNAs were attached to the GalNAc ligand ETL17. The siRNA sequences are shown in Table 18, where “Nf” is a 2′ fluoro-modified nucleoside, “n” is a 2′ O-methyl modified nucleoside, and “s” is a phosphorothioate linkage.

[0429] Six to eight week old female mice (strain ICR, n=4) were given a subcutaneous injection on Day 0 of a single 20 ug or 60 ug dose of a GalNAc-conjugated siRNA or PBS as vehicle control.

[0430] Mice were euthanized on Day 14 after injection and a liver sample from each was collected and placed in RNAlater (ThermoFisher Catalog #AM7020) until processing. Total liver RNA was prepared by homogenizing the liver tissue in homogenization buffer (Maxwell RSC simplyRNA Tissue Kit) using a Percellys 24 tissue homogenizer (Bertin Instruments) set at 5000 rpm for two 10 second cycles. Total RNA from the lysate was purified on a Maxwell RSC 48 platform (Promega Corporation) according to the manufacturer's recommendations. Preparation of cDNA was performed using Quanta qScript cDNA SuperMix (VWR, Catalog #95048-500) according to the manufacturer's instructions. The relative levels of liver FGG mRNA were assessed by RT-qPCR in triplicate on a QuantStudio™ 6 Pro Real-Time PCR System using TaqMan assays for mouse FGG (ThermoFisher, assay #Mm00513575 ml) and the mouse housekeeping gene PPIA (ThermoFisher, assay #Mm02342430_g1) and PerfeCTa® qPCR FastMix®, Low ROX™ (VWR, Catalog #101419-222). Data were normalized to the mean FGG mRNA level in animals receiving PBS. Results are shown in Table 19.

[0431] On Day 0 (prior to dosing), 7 and Day 14 blood was collected into tubes with 0.2 mL sodium citrate for collection of plasma. Plasma samples were analyzed for fibrinogen levels by ELISA (Molecular Innovations Mouse Fibrinogen Antigen ELISA kit, Cat #MFBGNKT). Results are shown in Table 20.

[0432] On Day 14 blood was collected into tubes with 0.2 mL sodium citrate for collection of plasma. Plasma samples were analyzed for PT and APTT at IDEXX Laboratories (IDEXX Laboratories, Test #6005). Results are shown in Table 21.

TABLE 18A
Example siRNA Sequences

| | SEQ | | SEQ | |
|---|---|---|---|---|
| | ID | Sense Strand Sequence (5′-3′) | ID | |
| ETD# | NO | with GalNAc moiety | NO | Antisense Strand Sequence (5′-3′) |
| ETD01818 | 3650 | [ETL17]sgaugAfAfaGfAfuucgguaguasusu | 3686 | usAfscUfaCfcGfaAfuCfuUfuCfaUfcsusu |
| ETD01839 | 3652 | [ETL17]sgaugAfAfaGfAfuucgguaguasusu | 3688 | usAfscuaCfcGfaAfuCfuUfuCfaUfcsusu |
| ETD01840 | 3653 | [ETL17]sgaugAfAfaGfAfuucgguaguasusu | 3689 | usAfscUfaccGfaAfuCfuUfuCfaUfcsusu |
| ETD01841 | 3654 | [ETL17]sgaugAfAfaGfAfuucgguaguasusu | 3690 | usAfscUfacCfgaAfuCfuUfuCfaUfcsusu |

TABLE 18B
Example siRNA BASE Sequences

| | SEQ | Sense Strand Base | SEQ | Antisense Strand Base |
|---|---|---|---|---|
| siRNA | ID | Sequence (5′ to 3′), | ID | Sequence (5′ to 3′), |
| Name | NO: | without 3′ overhangs | NO: | without 3′ overhangs |
| ETD01818 | 3722 | UACCAAGGTGGCACUUACA | 3758 | UACUACCGAAUCUUUCAUC |
| ETD01839 | 3724 | GAUGAAAGAUUCGGUAGUA | 3760 | UACUACCGAAUCUUUCAUC |
| ETD01840 | 3725 | UGACAAGUUUUUCACAUCA | 3761 | UACUACCGAAUCUUUCAUC |
| ETD01841 | 3726 | GAAGAUUCAUUUGAUAAGA | 3762 | UACUACCGAAUCUUUCAUC |

TABLE 19
Relative FGG mRNA Levels in Livers of Mice

| | | | Dose | Mean FGG mRNA |
|---|---|---|---|---|
| Group | n | Treatment | (ug) | (Normalized to Group 1, Day 14) |
| 1 | 4 | PBS | 0 | 1.00375 |
| 2 | 4 | ETD01818 | 20 | 0.90475 |
| 3 | 4 | ETD01818 | 60 | 0.41 |
| 4 | 4 | ETD01839 | 20 | 0.5715 |
| 5 | 4 | ETD01839 | 60 | 0.317 |
| 6 | 4 | ETD01840 | 20 | 0.70675 |
| 7 | 4 | ETD01840 | 60 | 0.2125 |
| 8 | 4 | ETD01841 | 20 | 0.4445 |
| 9 | 4 | ETD01841 | 60 | 0.246 |

TABLE 20
Fibrinogen Levels in Plasma of Mice
treated with siRNAs targeting FGG

| | | | | Mean Fibrinogen | | |
|---|---|---|---|---|---|---|
| | | | Dose | (Normalized, Day 0) | | |
| Group | n | Treatment | (ug) | Day 0 | Day 7 | Day 14 |
| 1 | 4 | PBS | 0 | 1 | 1.211 | 0.732 |
| 2 | 4 | ETD01818 | 20 | 1 | 0.832 | 0.531 |
| 3 | 4 | ETD01818 | 60 | 1 | 0.478 | 0.245 |
| 4 | 4 | ETD01839 | 20 | 1 | 0.436 | 0.395 |
| 5 | 4 | ETD01839 | 60 | 1 | 0.186 | 0.142 |
| 6 | 4 | ETD01840 | 20 | 1 | 0.555 | 0.645 |
| 7 | 4 | ETD01840 | 60 | 1 | 0.433 | 0.402 |
| 8 | 4 | ETD01841 | 20 | 1 | 0.541 | 0.371 |
| 9 | 4 | ETD01841 | 60 | 1 | 0.157 | 0.180 |

TABLE 21
PT and APTT Times in Mice treated with siRNAs targeting FGG

| | | | Dose | Mean PT (sec) | Mean APPT (sec) |
|---|---|---|---|---|---|
| Group | n | Treatment | (ug) | Day 14 | Day 14 |
| 1 | 4 | PBS | 0 | 17.4 | 47.6 |
| 2 | 4 | ETD01818 | 20 | 18.375 | 43.875 |
| 3 | 4 | ETD01818 | 60 | 24.875 | 64.8 |
| 4 | 4 | ETD01839 | 20 | 18.225 | 46.075 |
| 5 | 4 | ETD01839 | 60 | 20.425 | 45.325 |
| 6 | 4 | ETD01840 | 20 | 15.65 | 28.3 |
| 7 | 4 | ETD01840 | 60 | 19.625 | 50.725 |
| 8 | 4 | ETD01841 | 20 | 21.375 | 41.875 |
| 9 | 4 | ETD01841 | 60 | 31.575 | 47.233 |

### Example 13. Optimization of siRNAs from Position 1218 Targeting Human, Cynomolgous Monkey, Rat and Mouse FGG in Mice

[0433] Several siRNAs designed to be cross-reactive with human, cynomolgous monkey and mouse FGG mRNA were tested for activity in mice. The siRNAs were attached to the GalNAc ligand ETL17. The siRNA sequences are shown in Table 22A, where “Nf” is a 2′ fluoro-modified nucleoside, “n” is a 2′ O-methyl modified nucleoside, and “s” is a phosphorothioate linkage.

[0434] Six to eight week old female mice (strain ICR, n=4) were given a subcutaneous injection on Day 0 of a single 60 ug dose of a GalNAc-conjugated siRNA or PBS as vehicle control.

[0435] Mice were euthanized on Day 10 after injection and a liver sample from each was collected and placed in RNAlater (ThermoFisher Catalog #AM7020) until processing. Total liver RNA was prepared by homogenizing the liver tissue in homogenization buffer (Maxwell RSC simplyRNA Tissue Kit) using a Percellys 24 tissue homogenizer (Bertin Instruments) set at 5000 rpm for two 10 second cycles. Total RNA from the lysate was purified on a Maxwell RSC 48 platform (Promega Corporation) according to the manufacturer's recommendations. Preparation of cDNA was performed using Quanta qScript cDNA SuperMix (VWR, Catalog #95048-500) according to the manufacturer's instructions. The relative levels of liver FGG mRNA were assessed by RT-qPCR in triplicate on a QuantStudio™ 6 Pro Real-Time PCR System using TaqMan assays for mouse FGG (ThermoFisher, assay #Mm00513575 ml) and the mouse housekeeping gene PPIA (ThermoFisher, assay #Mm02342430_g1) and PerfeCTa® qPCR FastMix®, Low ROX™ (VWR, Catalog #101419-222). Data were normalized to the mean FGG mRNA level in animals receiving PBS. Results are shown in Table 23.

[0436] On Day 0 (prior to dosing), 7 and Day 10 blood was collected into tubes with 0.2 mL sodium citrate for collection of plasma. Plasma samples were analyzed for fibrinogen levels by ELISA (Molecular Innovations Mouse Fibrinogen Antigen ELISA kit, Cat #MFBGNKT). Results are shown in Table 24.

[0437] On Day 14 blood was collected into tubes with 0.2 mL sodium citrate for collection of plasma. Plasma samples were analyzed for PT and APTT at IDEXX Laboratories (IDEXX Laboratories, Test #6005). Results are shown in Table 25.

TABLE 22A
Example siRNA Sequences

| | SEQ | | SEQ | |
|---|---|---|---|---|
| | ID | Sense Strand Sequence (5′-3′) | ID | |
| ETD# | NO | with GalNAc moiety | NO | Antisense Strand Sequence (5′-3′) |
| ETD01841 | 3654 | [ETL17]sgaugAfAfaGfAfuucgguaguasusu | 369 | usAfscUfacCfgaAfuCfuUfuCfaUfcsusu |
| ETD01852 | 3658 | [ETL17]sugacaagUfUfUfUfucacaucasusu | 3694 | usGfsaUfgUfgAfaAfaAfcUfuGfuCfasusu |
| ETD01921 | 3670 | [ETL17]sugacaagUfUfuUfucacaucasusu | 3706 | usGfsaUfgUfgAfaAfaAfcUfuGfuCfasusu |
| ETD01922 | 3671 | [ETL17]sugacaaguUfuUfuCfacaucasusu | 3707 | usGfsaUfgUfgAfaAfaAfcUfuGfuCfasusu |
| ETD01923 | 3672 | [ETL17]sugacaagUfUfUfUfucacaucasusu | 3708 | usGfsaugUfgAfaAfaAfcUfuGfuCfasusu |
| ETD01924 | 3673 | [ETL17]sugacaagUfUfUfUfucacaucasusu | 3709 | usGfsaUfgUfgaaAfaAfcUfuGfuCfasusu |
| ETD01925 | 3674 | [ETL17]sugacaagUfUfUfUfucacaucasusu | 3710 | usGfsaUfguGfAfaAfaAfcUfuGfuCfasusu |
| ETD01926 | 3675 | [ETL17]sugacaagUfUfUfUfucacaucasusu | 3711 | usGfsaUfguGfaaaaAfcUfuGfuCfasusu |
| ETD01927 | 3676 | [ETL17]sugacaagUfUfUfUfucacaucasusu | 3712 | usGfsaugUfgAfaaaAfcUfuGfuCfasusu |

TABLE 22B
Example siRNA BASE Sequences

| | | Sense Strand | | Antisense Strand |
|---|---|---|---|---|
| | | Base Sequence | | Base Sequence |
| | SEQ | (5′ to 3′), | SEQ | (5′ to 3′), |
| siRNA | ID | without 3′ | ID | without 3′ |
| Name | NO: | overhangs | NO: | overhangs |
| ETD01841 | 3726 | GAAGAUUCAUUU | 3762 | UACUACCGAAUCUUUC |
| | | GAUAAGA | | AUC |
| ETD01852 | 3730 | UACCAAGGTGGC | 3766 | UGAUGUGAAAAACUUG |
| | | ACUUACA | | UCA |
| ETD01921 | 3742 | GAUGAAAGAUUC | 3778 | UGAUGUGAAAAACUUG |
| | | GGUAGUA | | UCA |
| ETD01922 | 3743 | GAUGAAAGAUUC | 3779 | UGAUGUGAAAAACUUG |
| | | GGUAGUA | | UCA |
| ETD01923 | 3744 | GAUGAAAGAUUC | 3780 | UGAUGUGAAAAACUUG |
| | | GGUAGUA | | UCA |
| ETD01924 | 3745 | GAUGAAAGAUUC | 3781 | UGAUGUGAAAAACUUG |
| | | GGUAGUA | | UCA |
| ETD01925 | 3746 | CUCAAUGGAGUU | 3782 | UGAUGUGAAAAACUUG |
| | | UAUUACA | | UCA |
| ETD01926 | 3747 | UGACAAGUUUUU | 3783 | UGAUGUGAAAAACUUG |
| | | CACAUCA | | UCA |
| ETD01927 | 3748 | UCAAUGGAGUUU | 3784 | UGAUGUGAAAAACUUG |
| | | AUUACCA | | UCA |

TABLE 23
Relative FGG mRNA Levels in Livers of Mice

| | | | Dose | Mean FGG mRNA |
|---|---|---|---|---|
| Group | n | Treatment | (ug) | (Normalized to Group 1, Day 10) |
| 1 | 4 | PBS | 0 | 1.01025 |
| 2 | 4 | ETD01841 | 60 | 0.436 |
| 3 | 4 | ETD01852 | 60 | 0.91125 |
| 4 | 4 | ETD01921 | 60 | 0.788 |
| 5 | 4 | ETD01922 | 60 | 1.384 |
| 6 | 4 | ETD01923 | 60 | 0.98975 |
| 7 | 4 | ETD01924 | 60 | 0.85675 |
| 8 | 4 | ETD01925 | 60 | 0.7335 |
| 9 | 4 | ETD01926 | 60 | 0.57025 |
| 10 | 4 | ETD01927 | 60 | 0.73425 |

TABLE 24
Fibrinogen Levels in Plasma of Mice
treated with siRNAs targeting FGG

| | | | | Mean Fibrinogen | | |
|---|---|---|---|---|---|---|
| | | | Dose | (Normalized, Day 0) | | |
| Group | n | Treatment | (ug) | Day 0 | Day 7 | Day 10 |
| 1 | 4 | PBS | 0 | 1 | 1.38 | 1.32 |
| 2 | 4 | ETD01841 | 60 | 1 | 0.65 | 0.52 |
| 3 | 4 | ETD01852 | 60 | 1 | 1.17 | 0.68 |
| 4 | 4 | ETD01921 | 60 | 1 | 0.95 | 0.69 |
| 5 | 4 | ETD01922 | 60 | 1 | 0.93 | 0.93 |
| 6 | 4 | ETD01923 | 60 | 1 | 1.08 | 0.97 |
| 7 | 4 | ETD01924 | 60 | 1 | 0.85 | 0.68 |
| 8 | 4 | ETD01925 | 60 | 1 | 0.82 | 0.60 |
| 9 | 4 | ETD01926 | 60 | 1 | 0.50 | 0.31 |
| 10 | 4 | ETD01927 | 60 | 1 | 0.51 | 0.58 |

TABLE 25
PT and APTT Times in Mice treated with siRNAs targeting FGG

| | | | Dose | Mean PT (sec) | Mean APPT (sec) |
|---|---|---|---|---|---|
| Group | n | Treatment | (ug) | Day 10 | Day 10 |
| 1 | 4 | PBS | 0 | 14.15 | 34.97 |
| 2 | 4 | ETD01841 | 60 | 31.85 | 37.07 |
| 3 | 4 | ETD01852 | 60 | 15.55 | 31.97 |
| 4 | 4 | ETD01921 | 60 | 15.825 | 42.83 |
| 5 | 4 | ETD01922 | 60 | 16.05 | 32.23 |
| 6 | 4 | ETD01923 | 60 | 15.55 | 46.4 |
| 7 | 4 | ETD01924 | 60 | 15.075 | 35.13 |
| 8 | 4 | ETD01925 | 60 | 16.57 | 34.03 |
| 9 | 4 | ETD01926 | 60 | 16.775 | 35.78 |
| 10 | 4 | ETD01927 | 60 | 16.075 | 45.6 |

### Example 14. Testing Differentially Modified GalNAc siRNAs Targeting Human, Cynomolgous Monkey, Rat and Mouse FGG in Mice

[0438] Several siRNAs designed to be cross-reactive with human, cynomolgous monkey and mouse FGG mRNA were tested for activity in mice. The siRNAs were attached to the GalNAc ligand ETL1 or ETL17. The siRNA sequences are shown in Table 26A, where “Nf” is a 2′ fluoro-modified nucleoside, “n” is a 2′ O-methyl modified nucleoside, and “s” is a phosphorothioate linkage.

[0439] Six to eight week old female mice (strain ICR, n=4) were given a subcutaneous injection on Day 0 of a single 60 ug or 120 ug dose of a GalNAc-conjugated siRNA or PBS as vehicle control.

[0440] Mice were euthanized on Day 14 after injection and a liver sample from each was collected and placed in RNAlater (ThermoFisher Catalog #AM7020) until processing. Total liver RNA was prepared by homogenizing the liver tissue in homogenization buffer (Maxwell RSC simplyRNA Tissue Kit) using a Percellys 24 tissue homogenizer (Bertin Instruments) set at 5000 rpm for two 10 second cycles. Total RNA from the lysate was purified on a Maxwell RSC 48 platform (Promega Corporation) according to the manufacturer's recommendations. Preparation of cDNA was performed using Quanta qScript cDNA SuperMix (VWR, Catalog #95048-500) according to the manufacturer's instructions. The relative levels of liver FGG mRNA were assessed by RT-qPCR in triplicate on a QuantStudio™ 6 Pro Real-Time PCR System using TaqMan assays for mouse FGG (ThermoFisher, assay #Mm00513575 ml) and the mouse housekeeping gene PPIA (ThermoFisher, assay #Mm02342430_g1) and PerfeCTa® qPCR FastMix®, Low ROX™ (VWR, Catalog #101419-222). Data were normalized to the mean FGG mRNA level in animals receiving PBS. Results are shown in Table 27.

[0441] On Day 0 (prior to dosing), 7 and Day 14 blood was collected into tubes with 0.2 mL sodium citrate for collection of plasma. Plasma samples were analyzed for fibrinogen levels by ELISA (Molecular Innovations Mouse Fibrinogen Antigen ELISA kit, Cat #MFBGNKT). Results are shown in Table 28.

[0442] On Day 14 blood was collected into tubes with 0.2 mL sodium citrate for collection of plasma. Plasma samples were analyzed for PT and APTT at IDEXX Laboratories (IDEXX Laboratories, Test #6005). Results are shown in Table 29. Mice injected with ETD01811, ETD01818, and ETD01819 had an increase in PT and APPT times on Day 7 and 14 relative to mice receiving PBS.

[0443] On Days 0, 7, and 14 blood was collected into tubes with no anti-coagulant serum collected. Clinical chemistry parameters containing ALT, ALP, TBIL, and BUN were analyzed at IDEXX Laboratories (IDEXX Laboratories, Test #62849). Results are shown in Table 30.

TABLE 26A
Example siRNA Sequences

| | | Sense Strand | | Antisense |
|---|---|---|---|---|
| | SEQ | Sequence | SEQ | Strand |
| | ID | (5′-3′) with | ID | Sequence |
| ETD# | NO | GalNAc moiety | NO | (5′-3′) |
| ETD01811 | 3649 | [ETL1]sgaugAf | 3685 | usAfscUfaCfc |
| | | AfaGfAfuucggu | | GfaAfuCfuUfu |
| | | aguasusu | | CfaUfcsusu |
| ETD01818 | 3650 | [ETL17]sgaugA | 3686 | usAfscUfaCfc |
| | | fAfaGfAfuucgg | | GfaAfuCfuUfu |
| | | uaguasusu | | CfaUfcsusu |
| ETD01819 | 3651 | [ETL17]sgaagA | 3687 | usCfsuUfaUfc |
| | | fuucAfuuugaua | | AfaAfuGfaAfu |
| | | agasusu | | CfuUfcsusu |

TABLE 26B
Example siRNA Base Sequences

| | | Sense Strand | | Antisense Strand |
|---|---|---|---|---|
| | | Base Sequence | | Base Sequence |
| | SEQ | (5′ to 3′), | SEQ | (5′ to 3′), |
| siRNA | ID | without | ID | without |
| Name | NO: | 3′ overhangs | NO: | 3′ overhangs |
| ETD01811 | 3721 | UGACAAGUUUUUC | 3757 | UACUACCGAAUCUUUCAUC |
| | | ACAUCA | | |
| ETD01818 | 3722 | UACCAAGGTGGCA | 3758 | UACUACCGAAUCUUUCAUC |
| | | CUUACA | | |
| ETD01819 | 3723 | UGACAAGUUUUUC | 3759 | UCUUAUCAAAUGAAUCUUC |
| | | ACAUCA | | |

TABLE 27
Relative FGG mRNA Levels in Livers of Mice

| | | | Dose | Mean FGG mRNA |
|---|---|---|---|---|
| Group | n | Treatment | (ug) | (Normalized to Group 1, Day 14) |
| 1 | 4 | PBS | 0 | 1.00 |
| 2 | 4 | ETD01811 | 60 | 0.23 |
| 3 | 4 | ETD01811 | 120 | 0.14 |
| 4 | 4 | ETD01818 | 60 | 0.17 |
| 5 | 4 | ETD01818 | 120 | 0.14 |
| 6 | 4 | ETD01819 | 120 | 0.16 |

TABLE 28
Fibrinogen Levels in Plasma of Mice
treated with siRNAs targeting FGG

| | | | | Mean Fibrinogen | | |
|---|---|---|---|---|---|---|
| | | | Dose | (Normalized, Day 0) | | |
| Group | n | Treatment | (ug) | Day 0 | Day 7 | Day 14 |
| 1 | 4 | PBS | 0 | 1 | 1.03 | 0.74 |
| 2 | 4 | ETD01811 | 60 | 1 | 0.20 | 0.18 |
| 3 | 4 | ETD01811 | 120 | 1 | 0.13 | 0.06 |
| 4 | 4 | ETD01818 | 60 | 1 | 0.16 | 0.12 |
| 5 | 4 | ETD01818 | 120 | 1 | 0.11 | 0.08 |
| 6 | 4 | ETD01819 | 120 | 1 | 0.23 | 0.14 |

TABLE 29
PT and APTT Times in Mice treated with siRNAs targeting FGG

| | | | Dose | Mean PT (sec) | Mean APPT (sec) |
|---|---|---|---|---|---|
| Group | n | Treatment | (ug) | Day 14 | Day 14 |
| 1 | 4 | PBS | 0 | 14 | 39.45 |
| 2 | 4 | ETD01811 | 60 | 18.4 | 57.675 |
| 3 | 4 | ETD01811 | 120 | 46.4 | 83.425 |
| 4 | 4 | ETD01818 | 60 | 21.3 | 61.825 |
| 5 | 4 | ETD01818 | 120 | 27 | 59.325 |
| 6 | 4 | ETD01819 | 120 | 18.675 | 43.525 |

TABLE 30
Clinical Chemistry in Mice treated with siRNAs targeting FGG

| | | | | ALT | ALP | TBILI | BUN |
|---|---|---|---|---|---|---|---|
| | | | Dose | (U/L) | (U/L) | (mg/dL) | (mg/dL) |
| Group | n | Treatment | (ug) | Day 14 | Day 14 | Day 14 | Day 14 |
| 1 | 4 | PBS | 0 | 98.25 | 91.75 | 0.1 | 21.25 |
| 2 | 4 | ETD01818 | 20 | 53.75 | 106.75 | 0.1 | 22.5 |
| 3 | 4 | ETD01818 | 60 | 72 | 60 | 0.1 | 21.5 |
| 4 | 4 | ETD01839 | 20 | 39.25 | 75 | 0.125 | 24 |
| 5 | 4 | ETD01839 | 60 | 25 | 90.25 | 0.1 | 19 |
| 6 | 4 | ETD01840 | 20 | 25.75 | 90 | 0.15 | 22.75 |

### Example 15. Screening siRNAs from Position 352 Targeting Human, Cynomolgous Monkey, Rat and Mouse FGG in Mice

[0444] Several siRNAs designed to be cross-reactive with human, cynomolgous monkey and mouse FGG mRNA were tested for activity in mice. The siRNAs were attached to the GalNAc ligand ETL17. The siRNA sequences are shown in Table 31A, where “Nf” is a 2′ fluoro-modified nucleoside, “n” is a 2′ O-methyl modified nucleoside, “d” is a deoxynucleoside, and “s” is a phosphorothioate linkage.

[0445] Six to eight week old female mice (strain ICR, n=3) were given a subcutaneous injection on Day 0 of a single 40 ug dose of a GalNAc-conjugated siRNA or PBS as vehicle control. Mice were euthanized on Day 14 after injection and a liver sample from each was collected and placed in RNAlater (ThermoFisher Catalog #AM7020) until processing. Total liver RNA was prepared by homogenizing the liver tissue in homogenization buffer (Maxwell RSC simplyRNA Tissue Kit) using a Percellys 24 tissue homogenizer (Bertin Instruments) set at 5000 rpm for two 10 second cycles. Total RNA from the lysate was purified on a Maxwell RSC 48 platform (Promega Corporation) according to the manufacturer's recommendations. Preparation of cDNA was performed using Quanta qScript cDNA SuperMix (VWR, Catalog #95048-500) according to the manufacturer's instructions. The relative levels of liver FGG mRNA were assessed by RT-qPCR in triplicate on a QuantStudio™ 6 Pro Real-Time PCR System using TaqMan assays for mouse FGG (ThermoFisher, assay #Mm00513575 ml) and the mouse housekeeping gene PPIA (ThermoFisher, assay #Mm02342430_g1) and PerfeCTa® qPCR FastMix®, Low ROX™ (VWR, Catalog #101419-222). Data were normalized to the mean FGG mRNA level in animals receiving PBS. Results are shown in Table 32.

TABLE 31A
Example siRNA Sequences

| | | Sense Strand | | Antisense |
|---|---|---|---|---|
| | SEQ | Sequence | SEQ | Strand |
| | ID | (5′-3′) with | ID | Sequence |
| ETD# | NO | GalNAc moiety | NO | (5′-3′) |
| ETD01818 | 3650 | [ETL17]sgaugA | 3686 | usAfscUfaCfcGfa |
| | | fAfaGfAfuucgg | | AfuCfuUfuCfaUfc |
| | | uaguasusu | | susu |
| ETD01918 | 3667 | [ETL17]sgaugA | 3703 | usAfscuaCfcgaAf |
| | | fAfaGfAfuucgg | | uCfuUfuCfaUfcsu |
| | | uaguasusu | | su |
| ETD01919 | 3668 | [ETL17]sgaugA | 3704 | dTsAfscuaCfcGfa |
| | | fAfaGfAfuucgg | | AfuCfuUfuCfaUfc |
| | | uaguasusu | | susu |
| ETD01920 | 3669 | [ETL17]sgaugA | 3705 | UfsAfscuaCfcGfa |
| | | fAfaGfAfuucgg | | AfuCfuUfuCfaUfc |
| | | uaguasusu | | susu |
| ETD01870 | 3664 | [ETL17]saggug | 3700 | usAfscdTadCcGfa |
| | | gCfaCfUfuacuc | | AfudCudTudCadTc |
| | | aaaasusu | | susu |
| ETD01869 | 3665 | [ETL17]sgaugA | 3701 | usAfscdTadCcGfa |
| | | fAfaGfAfuucgg | | AfudCuUfudCaUfc |
| | | uaguasusu | | susu |

TABLE 31B
Example siRNA Base Sequences

| | | | | Antisense |
|---|---|---|---|---|
| | | Sense Strand | | Strand |
| | | Base Sequence | | Base Sequence |
| | SEQ | (5′ to 3′), | SEQ | (5′ to 3′), |
| siRNA | ID | without | ID | without |
| Name | NO: | 3′ overhangs | NO: | 3′ overhangs |
| ETD01818 | 3722 | UACCAAGGTGGCA | 3758 | UACUACCGAAUCUU |
| | | CUUACA | | UCAUC |
| ETD01918 | 3739 | GAUGAAAGAUUCG | 3775 | UACUACCGAAUCUU |
| | | GUAGUA | | UCAUC |
| ETD01919 | 3740 | GAUGAAAGAUUCG | 3776 | TACUACCGAAUCUU |
| | | GUAGUA | | UCAUC |
| ETD01920 | 3741 | GAUGAAAGAUUCG | 3777 | UACUACCGAAUCUU |
| | | GUAGUA | | UCAUC |
| ETD01870 | 3738 | GAAGAUUCAUUUG | 3774 | UACTACCGAAUCUT |
| | | AUAAGA | | UCATC |
| ETD01869 | 3737 | GAUGAAAGAUUCG | 3773 | UACTACCGAAUCUU |
| | | GUAGUA | | UCAUC |

TABLE 32
Relative FGG mRNA Levels in Livers of Mice

| | | | Dose | Mean FGG mRNA |
|---|---|---|---|---|
| Group | n | Treatment | (ug) | (Normalized to Group 1, Day 14) |
| 1 | 3 | PBS | 0 | 1.00 |
| 2 | 3 | ETD01818 | 40 | 0.66 |
| 3 | 3 | ETD01918 | 40 | 0.40 |
| 4 | 3 | ETD01919 | 40 | 1.06 |
| 5 | 3 | ETD01920 | 40 | 1.10 |
| 6 | 3 | ETD01870 | 40 | 1.71 |
| 7 | 3 | ETD01869 | 40 | 0.71 |

### Example 16. Screening siRNAs from siRCHv2 Targeting Human, Cynomolgous Monkey, Rat and Mouse FGG in Mice

[0446] Several siRNAs designed to be cross-reactive with human, cynomolgous monkey and mouse FGG mRNA were tested for activity in mice. The siRNAs were attached to the GalNAc ligand ETL1 or ETL17. The siRNA sequences are shown in Table 33A, where “Nf” is a 2′ fluoro-modified nucleoside, “n” is a 2′ O-methyl modified nucleoside, “d” is a deoxynucleoside, and “s” is a phosphorothioate linkage.

[0447] Six to eight week old female mice (strain ICR, n=3) were given a subcutaneous injection on Day 0 of a single 60 ug dose of a GalNAc-conjugated siRNA or PBS as vehicle control.

[0448] Mice were euthanized on Day 10 after injection and a liver sample from each was collected and placed in RNAlater (ThermoFisher Catalog #AM7020) until processing. Total liver RNA was prepared by homogenizing the liver tissue in homogenization buffer (Maxwell RSC simplyRNA Tissue Kit) using a Percellys 24 tissue homogenizer (Bertin Instruments) set at 5000 rpm for two 10 second cycles. Total RNA from the lysate was purified on a Maxwell RSC 48 platform (Promega Corporation) according to the manufacturer's recommendations. Preparation of cDNA was performed using Quanta qScript cDNA SuperMix (VWR, Catalog #95048-500) according to the manufacturer's instructions. The relative levels of liver FGG mRNA were assessed by RT-qPCR in triplicate on a QuantStudio™ 6 Pro Real-Time PCR System using TaqMan assays for mouse FGG (ThermoFisher, assay #Mm00513575 ml) and the mouse housekeeping gene PPIA (ThermoFisher, assay #Mm02342430_g1) and PerfeCTa® qPCR FastMix®, Low ROX™ (VWR, Catalog #101419-222). Data were normalized to the mean FGG mRNA level in animals receiving PBS. Results are shown in Table 34.

[0449] On Day 0 (prior to dosing), Day 10 blood was collected into tubes with 0.2 mL sodium citrate for collection of plasma. Plasma samples were analyzed for fibrinogen levels by ELISA (Molecular Innovations Mouse Fibrinogen Antigen ELISA kit, Cat #MFBGNKT). Results are shown in Table 35.

[0450] On Day 10 blood was collected into tubes with 0.2 mL sodium citrate for collection of plasma. Plasma samples were analyzed for PT and APTT at IDEXX Laboratories (IDEXX Laboratories, Test #6005). Results are shown in Table 36.

TABLE 33A
Example siRNA Sequences

| | | Sense Strand | | Antisense |
|---|---|---|---|---|
| | SEQ | Sequence | SEQ | Strand |
| | ID | (5′-3′) with | ID | Sequence |
| ETD# | NO | GalNAc moiety | NO | (5′-3′) |
| ETD01818 | 3650 | [ETL17\|sgaugA | 3686 | usAfscUfaCfc |
| | | fAfaGfAfuucgg | | GfaAfuCfuUfu |
| | | uaguasusu | | CfaUfcsusu |
| ETD01808 | 3647 | [ETL1]scucaAf | 3683 | usGfsuAfaUfa |
| | | uGfGfAfGfuuua | | AfaCfuCfcAfu |
| | | uuacasusu | | UfgAfgsusu |
| ETD01809 | 3648 | [ETL1]sucaauG | 3684 | usGfsgUfaAfu |
| | | fGfAfGfuuuauu | | AfaAfcUfcCfa |
| | | accasusu | | UfuGfasusu |
| ETD01849 | 3655 | [ETL17]sagaca | 3691 | usGfsaCfcAfa |
| | | UfCfaUfgaguug | | CfuCfaUfgAfu |
| | | gucasusu | | GfuCfususu |
| ETD01851 | 3656 | [ETL17]sagacu | 3692 | usGfsuUfcUfg |
| | | GfGfAfAfuGfgc | | CfcAfuUfcCfa |
| | | agaacasusu | | GfuCfususu |
| ETD01852 | 3657 | [ETL17]sugaca | 3693 | usGfsaUfgUfg |
| | | agUfUfUfUfuca | | AfaAfaAfcUfu |
| | | caucasusu | | GfuCfasusu |
| ETD01853 | 3658 | [ETL17]sugaca | 3694 | usGfsgAfuGfu |
| | | agUfUfUfUfuca | | GfaAfaAfaCfu |
| | | caucasusu | | UfgUfcsusu |
| ETD01855 | 3659 | [ETL17]sgacaa | 3695 | usCfsaCfcUfu |
| | | gUfUfUfUfUfca | | GfgUfaAfuAfa |
| | | cauccasusu | | AfcUfcsusu |
| ETD01856 | 3660 | [ETL17]sgaguU | 3696 | usGfsuAfaGfu |
| | | fUfaUfUfaCfca | | GfcCfaCfcUfu |
| | | aggugasusu | | GfgUfasusu |
| ETD01857 | 3661 | [ETL17]suaccA | 3697 | usAfsgUfaAfg |
| | | faGfGfdTggcac | | UfgCfcAfcCfu |
| | | uuacasusu | | UfgGfususu |
| ETD01858 | 3662 | [ETL17]saccaA | 3698 | usUfsuGfaGfu |
| | | fGfguGfGfcacu | | AfaGfuGfcCfa |
| | | uacuasusu | | CfcUfususu |
| ETD01859 | 3663 | [ETL17]saaggu | 3699 | usUfsuUfgAfg |
| | | GfGfcAfcuuacu | | UfaAfgUfgCfc |
| | | caaasusu | | AfcCfususu |

TABLE 33B
Example siRNA Base Sequences

| | | | | Antisense |
|---|---|---|---|---|
| | | Sense Strand | | Strand Base |
| | | Base Sequence | | Sequence |
| | SEQ | (5′ to 3′), | SEQ | (5′ to 3′), |
| siRNA | ID | without 3′ | ID | without 3′ |
| Name | NO: | overhangs | NO: | overhangs |
| ETD01818 | 3722 | UACCAAGGTGGCA | 3758 | UACUACCGAAUCU |
| | | CUUACA | | UUCAUC |
| ETD01808 | 3719 | UGACAAGUUUUUC | 3755 | UGUAAUAAACUCC |
| | | ACAUCA | | AUUGAG |
| ETD01809 | 3720 | UGACAAGUUUUUC | 3756 | UGGUAAUAAACUC |
| | | ACAUCA | | CAUUGA |
| ETD01849 | 3727 | GAUGAAAGAUUCG | 3763 | UGACCAACUCAUG |
| | | GUAGUA | | AUGUCU |
| ETD01851 | 3728 | AGACAUCAUGAGU | 3764 | UGUUCUGCCAUUC |
| | | UGGUCA | | CAGUCU |
| ETD01852 | 3729 | GACAAGUUUUUCA | 3765 | UGAUGUGAAAAAC |
| | | CAUCCA | | UUGUCA |
| ETD01853 | 3730 | UACCAAGGTGGCA | 3766 | UGGAUGUGAAAAA |
| | | CUUACA | | CUUGUC |
| ETD01855 | 3731 | ACCAAGGUGGCAC | 3767 | UCACCUUGGUAAU |
| | | UUACUA | | AAACUC |
| ETD01856 | 3732 | UGACAAGUUUUUC | 3768 | UGUAAGUGCCACC |
| | | ACAUCA | | UUGGUA |
| ETD01857 | 3733 | GAUGAAAGAUUCG | 3769 | UAGUAAGUGCCAC |
| | | GUAGUA | | CUUGGU |
| ETD01858 | 3734 | GAUGAAAGAUUCG | 3770 | UUUGAGUAAGUGC |
| | | GUAGUA | | CACCUU |
| ETD01859 | 3735 | UGACAAGUUUUUC | 3771 | UUUUGAGUAAGUG |
| | | ACAUCA | | CCACCU |

TABLE 34
Relative FGG mRNA Levels in Livers of Mice

| | | | Dose | Mean FGG mRNA |
|---|---|---|---|---|
| Group | n | Treatment | (ug) | (Normalized to Group 1, Day 10) |
| 1 | 3 | PBS | 0 | 1.00 |
| 2 | 3 | ETD01818 | 60 | 0.22 |
| 3 | 3 | ETD01808 | 60 | 1.12 |
| 4 | 3 | ETD01809 | 60 | 1.00 |
| 5 | 3 | ETD01849 | 60 | 0.64 |
| 6 | 3 | ETD01851 | 60 | 0.53 |
| 7 | 3 | ETD01852 | 60 | 0.33 |
| 8 | 3 | ETD01853 | 60 | 0.69 |
| 9 | 3 | ETD01855 | 60 | 0.96 |
| 10 | 3 | ETD01856 | 60 | 0.77 |
| 11 | 3 | ETD01857 | 60 | 0.71 |
| 12 | 3 | ETD01858 | 60 | 0.91 |
| 13 | 3 | ETD01859 | 60 | 1.00 |

TABLE 35
Fibrinogen Levels in Plasma of Mice
treated with siRNAs targeting FGG

| | |
|---|---|
| | Mean Fibrinogen |
| Dose | (Normalized, Day 0) |

| Group | n | Treatment | (ug) | Day 0 | Day 10 |
|---|---|---|---|---|---|
| 1 | 3 | PBS | 0 | 1.00 | 0.96 |
| 2 | 3 | ETD01818 | 60 | 1.00 | 0.34 |
| 3 | 3 | ETD01808 | 60 | 1.00 | 0.38 |
| 4 | 3 | ETD01809 | 60 | 1.00 | 0.53 |
| 5 | 3 | ETD01849 | 60 | 1.00 | 0.42 |
| 6 | 3 | ETD01851 | 60 | 1.00 | 0.80 |
| 7 | 3 | ETD01852 | 60 | 1.00 | 0.96 |
| 8 | 3 | ETD01853 | 60 | 1.00 | 0.34 |
| 9 | 3 | ETD01855 | 60 | 1.00 | 0.38 |
| 10 | 3 | ETD01856 | 60 | 1.00 | 0.53 |
| 11 | 3 | ETD01857 | 60 | 1.00 | 0.42 |
| 12 | 3 | ETD01858 | 60 | 1.00 | 0.80 |
| 13 | 3 | ETD01859 | 60 | 1.00 | 0.96 |

TABLE 36
PT and APTT Times in Mice treated with siRNAs targeting FGG

| | | | | Mean PT | Mean APPT |
|---|---|---|---|---|---|
| | | | Dose | (sec) | (sec) |
| Group | n | Treatment | (ug) | Day 14 | Day 14 |
| 1 | 3 | PBS | 0 | 16.17 | 35.10 |
| 2 | 3 | ETD01818 | 60 | 18.40 | 32.33 |
| 3 | 3 | ETD01808 | 60 | 17.30 | 47.60 |
| 4 | 3 | ETD01809 | 60 | 17.83 | 49.57 |
| 5 | 3 | ETD01849 | 60 | 21.27 | 44.50 |
| 6 | 3 | ETD01851 | 60 | 43.73 | 18.97 |
| 7 | 3 | ETD01852 | 60 | 48.83 | 18.10 |
| 8 | 3 | ETD01853 | 60 | 34.15 | 52.45 |
| 9 | 3 | ETD01855 | 60 | 18.20 | 45.50 |
| 10 | 3 | ETD01856 | 60 | 16.00 | 43.93 |
| 11 | 3 | ETD01857 | 60 | 15.90 | 48.67 |
| 12 | 3 | ETD01858 | 60 | 24.60 | 55.85 |
| 13 | 3 | ETD01859 | 60 | 17.43 | 39.13 |

### Example 17. Screening of siRNAs from Positions 352 and 1218 Targeting Human FGG mRNA in Mice Transfected with AAV8-TBG-h-FGG

[0451] Several siRNAs designed to be cross-reactive with human, cynomolgus monkey, rat and mouse FGG mRNA were tested for activity in mice following transfection with an adeno-associated viral vector. The siRNAs were attached to the GalNAc ligand ETL17. The siRNA sequences are shown in Table 37A, where “Nf” is a 2′ fluoro-modified nucleoside, “n” is a 2′ O-methyl modified nucleoside, “d” is a deoxynucleoside, and “s” is a phosphorothioate linkage.

[0452] Six to eight week old female mice (C57Bl/6) were injected with 10 μL of a recombinant adeno-associated virus 8 (AAV8) vector (2.1×10E13 genome copies/mL) by the retroorbital route on Day −14. The recombinant AAV8 contains the open reading frame and a portion of the 5′ and 3′UTRs of the human FGG sequence (ENST00000404648) under the control of the human thyroxine binding globulin promoter in an AAV2 backbone packaged in AAV8 capsid (AAV8-TBG-h-FGG). On Day 0, infected mice (n=3) were given a subcutaneous injection of a single 60 ug dose of a GalNAc-conjugated siRNA or PBS as vehicle control.

[0453] Mice were euthanized on Day 14 after subcutaneous injection and a liver sample from each was collected and placed in RNAlater (ThermoFisher Catalog #AM7020) until processing. Total liver RNA was prepared by homogenizing the liver tissue in homogenization buffer (Maxwell RSC simplyRNA Tissue Kit) using a Percellys 24 tissue homogenizer (Bertin Instruments) set at 5000 rpm for two 10 second cycles. Total RNA from the lysate was purified on a Maxwell RSC 48 platform (Promega Corporation) according to the manufacturer's recommendations. Preparation of cDNA was performed using Quanta qScript cDNA SuperMix (VWR, Catalog #95048-500) according to the manufacturer's instructions. The relative levels of liver MTRES1 mRNA were assessed by RT-qPCR in triplicate on a QuantStudio™ 6 Pro Real-Time PCR System using TaqMan assays for human FGG (ThermoFisher, assay #Hs00241038 ml), or mouse FGG (ThermoFisher, assay #Mm00513575_m1) and the mouse housekeeping gene PPIA (ThermoFisher, assay #Mm02342430_g1) and PerfeCTa® qPCR FastMix®, Low ROX™ (VWR, Catalog #101419-222). Data were normalized to the mean FGG mRNA level in animals receiving PBS. Mice injected with ETD01592, ETD01594, ETD01745, ETD01747, ETD01748, and ETD01750 had substantial reductions in mean liver mouse FGG mRNA on Day 14 relative to mice receiving PBS. Results are shown in Table 38. Mice injected with ETD01592, ETD01594, ETD01745, ETD01747, ETD01748, and ETD01750 had substantial reductions in mean liver human FGG mRNA on Day 14 relative to mice receiving PBS. Results are shown in Table 39.

[0454] On Day 0 (prior to dosing), 7 and Day 10 blood was collected into tubes with 0.2 mL sodium citrate for collection of plasma. Plasma samples were analyzed for fibrinogen levels by ELISA (Molecular Innovations Mouse Fibrinogen Antigen ELISA kit, Cat #MFBGNKT). Results are shown in Table 40.

[0455] On Day 14 blood was collected into tubes with 0.2 mL sodium citrate for collection of plasma. Plasma samples were analyzed for PT and APTT at IDEXX Laboratories (IDEXX Laboratories, Test #6005). Results are shown in Table 41. On average mice injected with ETD01592, ETD01594, ETD01745, ETD01747, ETD01748, and ETD01750 had no change in PT and APPT times on Day 14 relative to mice receiving PBS.

TABLE 37A
Example siRNA Sequences

| | | Sense Strand | | Antisense |
|---|---|---|---|---|
| | SEQ | Sequence | SEQ | Strand |
| | ID | (5′-3′) with | ID | Sequence |
| ETD# | NO | GalNAc moiety | NO | (5′-3′) |
| ETD01592 | 3641 | [ETL1]gsasugA | 3677 | usAfscUfaCfc |
| | | fAfaGfAfuucgg | | GfaAfuCfuUfu |
| | | uaguasusu | | CfaUfcsusu |
| ETD01594 | 3642 | [ETL1]gsasagA | 3678 | usCfsuUfaUfc |
| | | fuucAfuuugaua | | AfaAfuGfaAfu |
| | | agasusu | | CfuUfcsusu |
| ETD01745 | 3643 | [ETL1]sgaugAf | 3679 | usAfscUfaCfc |
| | | AfaGfAfuucgGf | | GfaAfuCfuUfu |
| | | uaGfuasusu | | CfaUfcsusu |
| ETD01747 | 3644 | [ETL1]sgaugAf | 3680 | usAfscUfaCfc |
| | | AfaGfdAuUfCfg | | GfaAfuCfuUfu |
| | | gUfaguasusu | | CfaUfcsusu |
| ETD01748 | 3645 | [ETL1]sgaAfGf | 3681 | usCfsuUfaUfc |
| | | auucAfuuugAfu | | AfaAfuGfaAfu |
| | | AfAfgasusu | | CfuUfcsusu |
| ETD01750 | 3646 | [ETL1]sgaAfgA | 3682 | usCfsuUfaUfc |
| | | fuUfCfdAuUfUf | | AfaAfuGfaAfu |
| | | gaUfaagasusu | | CfuUfcsusu |

TABLE 37B
Example siRNA Base Sequences

| | | Sense | | Antisense |
|---|---|---|---|---|
| | | Strand | | Strand |
| | | Base | | Base |
| | | Sequence | | Sequence |
| | SEQ | (5′ to 3′), | SEQ | (5′ to 3′), |
| siRNA | ID | without 3′ | ID | without 3′ |
| Name | NO: | overhangs | NO: | overhangs |
| ETD01592 | 3713 | GAUGAAAGAUUC | 3749 | UACUACCGAAUCU |
| | | GGUAGUA | | UUCAUC |
| ETD01594 | 3714 | GAUGAAAGAUUC | 3750 | UCUUAUCAAAUGA |
| | | GGUAGUA | | AUCUUC |
| ETD01745 | 3715 | GAUGAAAGAUUC | 3751 | UACUACCGAAUCU |
| | | GGUAGUA | | UUCAUC |
| ETD01747 | 3716 | GAUGAAAGAUUC | 3752 | UACUACCGAAUCU |
| | | GGUAGUA | | UUCAUC |
| ETD01748 | 3717 | GAUGAAAGAUUC | 3753 | UCUUAUCAAAUGA |
| | | GGUAGUA | | AUCUUC |
| ETD01750 | 3718 | UGACAAGUUUUU | 3754 | UCUUAUCAAAUGA |
| | | CACAUCA | | AUCUUC |

TABLE 38
Relative mouse FG mRNA Levels in Livers of Mice

| | | | Dose | Mean mouse MTRES1 mRNA |
|---|---|---|---|---|
| Group | n | Treatment | (ug) | (Normalized to Group 1, Day 14) |
| 1 | 3 | PBS | 0 | 1.00 |
| 2 | 3 | ETD01592 | 60 | 0.23 |
| 3 | 3 | ETD01594 | 60 | 0.35 |
| 4 | 3 | ETD01745 | 60 | 0.31 |
| 5 | 3 | ETD01747 | 60 | 0.27 |
| 6 | 3 | ETD01748 | 60 | 0.42 |
| 7 | 3 | ETD01750 | 60 | 0.49 |

TABLE 39
Relative human FGG mRNA Levels in Livers of Mice

| | | | Dose | Mean human MTRES1 mRNA |
|---|---|---|---|---|
| Group | n | Treatment | (ug) | (Normalized to Group 6, Day 14) |
| 1 | 3 | PBS | 0 | 1.00 |
| 2 | 3 | ETD01592 | 60 | 0.22 |
| 3 | 3 | ETD01594 | 60 | 0.43 |
| 4 | 3 | ETD01745 | 60 | 0.49 |
| 5 | 3 | ETD01747 | 60 | 0.24 |
| 6 | 3 | ETD01748 | 60 | 0.42 |
| 7 | 3 | ETD01750 | 60 | 0.51 |

TABLE 40
Fibrinogen Levels in Plasma of Mice
treated with siRNAs targeting FGG

| | |
|---|---|
| | Mean Fibrinogen |
| Dose | (Normalized, Day 0) |

| Group | n | Treatment | (ug) | Day 0 | Day 14 |
|---|---|---|---|---|---|
| 1 | 3 | PBS | 0 | 1 | 0.445 |
| 2 | 3 | ETD01592 | 60 | 1 | 0.242 |
| 3 | 3 | ETD01594 | 60 | 1 | 0.303 |
| 4 | 3 | ETD01745 | 60 | 1 | 0.216 |
| 5 | 3 | ETD01747 | 60 | 1 | 0.074 |
| 6 | 3 | ETD01748 | 60 | 1 | 1.209 |
| 7 | 3 | ETD01750 | 60 | 1 | 0.468 |

TABLE 41
PT and APTT Times in Mice treated with siRNAs targeting FGG

| | | | | Mean PT | Mean APPT |
|---|---|---|---|---|---|
| | | | Dose | (sec) | (sec) |
| Group | n | Treatment | (ug) | Day 10 | Day 10 |
| 1 | 3 | PBS | 0 | 20.643 | 81.215 |
| 2 | 3 | ETD01592 | 60 | 17.058 | 35.874 |
| 3 | 3 | ETD01594 | 60 | 14.684 | 36.348 |
| 4 | 3 | ETD01745 | 60 | 15.639 | 33.771 |
| 5 | 3 | ETD01747 | 60 | 25.907 | 55.384 |
| 6 | 3 | ETD01748 | 60 | 15.052 | 34.784 |
| 7 | 3 | ETD01750 | 60 | 14.162 | 34.452 |

### Example 18. Screening of siRNAs Targeting Human FGG mRNA in Mice Transfected with AAV8-TBG-h-FGG

[0456] Several siRNAs designed to be cross-reactive with human, cynomolgus monkey, rat and mouse FGG mRNA were tested for activity in mice following transfection with an adeno-associated viral vector. The siRNAs were attached to the GalNAc ligand ETL17. The siRNA sequences are shown in Table 42A, where “Nf” is a 2′ fluoro-modified nucleoside, “n” is a 2′ O-methyl modified nucleoside, “d” is a deoxynucleoside, and “s” is a phosphorothioate linkage.

[0457] Six to eight week old female mice (C57Bl/6) were injected with 10 μL of a recombinant adeno-associated virus 8 (AAV8) vector (2.1×10E13 genome copies/mL) by the retroorbital route on Day 14. The recombinant AAV8 contains the open reading frame and a portion of the 5′ and 3′UTRs of the human FGG sequence (ENST00000404648) under the control of the human thyroxine binding globulin promoter in an AAV2 backbone packaged in AAV8 capsid (AAV8-TBG-h-FGG). On Day 0, infected mice (n=4) were given a subcutaneous injection of a single 60 ug dose of a GalNAc-conjugated siRNA or PBS as vehicle control.

[0458] Mice were euthanized on Day 10 after subcutaneous injection and a liver sample from each was collected and placed in RNAlater (ThermoFisher Catalog #AM7020) until processing. Total liver RNA was prepared by homogenizing the liver tissue in homogenization buffer (Maxwell RSC simplyRNA Tissue Kit) using a Percellys 24 tissue homogenizer (Bertin Instruments) set at 5000 rpm for two 10 second cycles. Total RNA from the lysate was purified on a Maxwell RSC 48 platform (Promega Corporation) according to the manufacturer's recommendations. Preparation of cDNA was performed using Quanta qScript cDNA SuperMix (VWR, Catalog #95048-500) according to the manufacturer's instructions. The relative levels of liver MTRES1 mRNA were assessed by RT-qPCR in triplicate on a QuantStudio™ 6 Pro Real-Time PCR System using TaqMan assays for human FGG (ThermoFisher, assay #Hs00241038 ml), or mouse FGG (ThermoFisher, assay #Mm00513575_m1) and the mouse housekeeping gene PPIA (ThermoFisher, assay #Mm02342430_g1) and PerfeCTa® qPCR FastMix®, Low ROX™ (VWR, Catalog #101419-222). Data were normalized to the mean FGG mRNA level in animals receiving PBS. Mice injected with ETD01818, ETD01839, ETD01841, ETD01849, ETD01852, had greatest reductions in mean liver mouse FGG mRNA on Day 10 relative to mice receiving PBS. Results are shown in Table 43. Mice injected with ETD01818, ETD01839, ETD01841, ETD01849, and ETD01856 had greatest reductions in mean liver human FGG mRNA on Day 10 relative to mice receiving PBS. Results are shown in Table 44.

[0459] On Day 0 (prior to dosing), 7 and Day 10 blood was collected into tubes with 0.2 mL sodium citrate for collection of plasma. Plasma samples were analyzed for fibrinogen levels by ELISA (Molecular Innovations Mouse Fibrinogen Antigen ELISA kit, Cat #MFBGNKT). Results are shown in Table 45.

[0460] On Day 14 blood was collected into tubes with 0.2 mL sodium citrate for collection of plasma. Plasma samples were analyzed for PT and APTT at IDEXX Laboratories (IDEXX Laboratories, Test #6005). Results are shown in Table 46. Mice injected with ETD01818, ETD01839, ETD01840, and ETD01841 had an increase in PT and APPT times on Day 7 and 10 relative to mice receiving PBS.

TABLE 42A
Example siRNA Sequences

| | | Sense Strand | | Antisense |
|---|---|---|---|---|
| | SEQ | Sequence | SEQ | Strand |
| | ID | (5′-3′) with | ID | Sequence |
| ETD# | NO | GalNAc moiety | NO | (5′-3′) |
| ETD01818 | 3650 | [ETL17]sgaugA | 3686 | usAfscUfaCfc |
| | | fAfaGfAfuucgg | | GfaAfuCfuUfu |
| | | uaguasusu | | CfaUfcsusu |
| ETD01839 | 3652 | [ETL17]sgaugA | 3688 | usAfscuaCfcG |
| | | fAfaGfAfuucgg | | faAfuCfuUfuC |
| | | uaguasusu | | faUfcsusu |
| ETD01841 | 3654 | [ETL17]sgaugA | 3690 | usAfscUfacCf |
| | | fAfaGfAfuucgg | | gaAfuCfuUfuC |
| | | uaguasusu | | faUfcsusu |
| ETD01849 | 3655 | [ETL17]sagaca | 3691 | usGfsaCfcAfa |
| | | UfCfaUfgaguug | | CfuCfaUfgAfu |
| | | gucasusu | | GfuCfususu |
| ETD01851 | 3656 | [ETL17]sagacu | 3692 | usGfsuUfcUfg |
| | | GfGfAfAfuGfgc | | CfcAfuUfcCfa |
| | | agaacasusu | | GfuCfususu |
| ETD01852 | 3657 | [ETL17]sugaca | 3693 | usGfsaUfgUfg |
| | | agUfUfUfUfuca | | AfaAfaAfcUfu |
| | | caucasusu | | GfuCfasusu |
| ETD01853 | 3658 | [ETL17]sugaca | 3694 | usGfsgAfuGfu |
| | | agUfUfUfUfuca | | GfaAfaAfaCfu |
| | | caucasusu | | UfgUfcsusu |
| ETD01856 | 3659 | [ETL17]sgacaa | 3695 | usGfsuAfaGfu |
| | | gUfUfUfUfUfca | | GfcCfaCfcUfu |
| | | cauccasusu | | GfgUfasusu |
| ETD01857 | 3660 | [ETL17]sgaguU | 3696 | usAfsgUfaAfg |
| | | fUfaUfUfaCfca | | UfgCfcAfcCfu |
| | | aggugasusu | | UfgGfususu |

TABLE 42B
Example siRNA Base Sequences

| | | Sense | | Antisense |
|---|---|---|---|---|
| | | Strand | | Strand |
| | | Base | | Base |
| | | Sequence | | Sequence |
| | SEQ | (5′ to 3′), | SEQ | (5′ to 3′), |
| siRNA | ID | without 3′ | ID | without 3′ |
| Name | NO: | overhangs | NO: | overhangs |
| ETD01818 | 3722 | UACCAAGGTGG | 3758 | UACUACCGAAU |
| | | CACUUACA | | CUUUCAUC |
| ETD01839 | 3724 | GAUGAAAGAUU | 3760 | UACUACCGAAU |
| | | CGGUAGUA | | CUUUCAUC |
| ETD01841 | 3726 | GAAGAUUCAUU | 3762 | UACUACCGAAU |
| | | UGAUAAGA | | CUUUCAUC |
| ETD01849 | 3727 | GAUGAAAGAUU | 3763 | UGACCAACUCA |
| | | CGGUAGUA | | UGAUGUCU |
| ETD01851 | 3728 | AGACAUCAUGA | 3764 | UGUUCUGCCAU |
| | | GUUGGUCA | | UCCAGUCU |
| ETD01852 | 3729 | GACAAGUUUUU | 3765 | UGAUGUGAAAA |
| | | CACAUCCA | | ACUUGUCA |
| ETD01853 | 3730 | UACCAAGGTGG | 3766 | UGGAUGUGAAA |
| | | CACUUACA | | AACUUGUC |
| ETD01856 | 3731 | ACCAAGGUGGC | 3767 | UGUAAGUGCCA |
| | | ACUUACUA | | CCUUGGUA |
| ETD01857 | 3732 | UGACAAGUUUU | 3768 | UAGUAAGUGCC |
| | | UCACAUCA | | ACCUUGGU |

TABLE 43
Relative mouse FGG mRNA Levels in Livers of Mice

| | | | Dose | Mean mouse MTRES1 mRNA |
|---|---|---|---|---|
| Group | n | Treatment | (ug) | (Normalized to Group 1, Day 10) |
| 1 | 4 | PBS | 0 | 1.00 |
| 2 | 4 | ETD01818 | 60 | 0.21 |
| 3 | 4 | ETD01839 | 60 | 0.25 |
| 4 | 4 | ETD01841 | 60 | 0.21 |
| 5 | 4 | ETD01849 | 60 | 0.44 |
| 6 | 4 | ETD01851 | 60 | 0.76 |
| 7 | 4 | ETD01852 | 60 | 0.53 |
| 8 | 4 | ETD01853 | 60 | 0.73 |
| 9 | 4 | ETD01856 | 60 | 0.75 |
| 10 | 4 | ETD01857 | 60 | 0.83 |

TABLE 44
Relative human FGG mRNA Levels in Livers of Mice

| | | | Dose | Mean human MTRES1 mRNA |
|---|---|---|---|---|
| Group | n | Treatment | (ug) | (Normalized to Group 6, Day 10) |
| 1 | 4 | PBS | 0 | N/A |
| 2 | 4 | ETD01818 | 60 | 0.43 |
| 3 | 4 | ETD01839 | 60 | 0.52 |
| 4 | 4 | ETD01841 | 60 | 0.61 |
| 5 | 4 | ETD01849 | 60 | 0.26 |
| 6 | 4 | ETD01851 | 60 | 1.00 |
| 7 | 4 | ETD01852 | 60 | 0.76 |
| 8 | 4 | ETD01853 | 60 | 0.72 |
| 9 | 4 | ETD01856 | 60 | 0.43 |
| 10 | 4 | ETD01857 | 60 | 0.59 |

TABLE 45
Fibrinogen Levels in Plasma of Mice
treated with siRNAs targeting FGG

| | | | | Mean Fibrinogen | | |
|---|---|---|---|---|---|---|
| | | | Dose | (Normalized, Day 0) | | |
| Group | n | Treatment | (ug) | Day 0 | Day 4 | Day 10 |
| 1 | 4 | PBS | 0 | 1 | 0.843 | 0.630 |
| 2 | 4 | ETD01818 | 60 | 1 | 0.452 | 0.367 |
| 3 | 4 | ETD01839 | 60 | 1 | 0.516 | 0.178 |
| 4 | 4 | ETD01841 | 60 | 1 | 0.415 | 0.220 |
| 5 | 4 | ETD01849 | 60 | 1 | 0.724 | 0.619 |
| 6 | 4 | ETD01851 | 60 | 1 | 0.498 | 0.839 |
| 7 | 4 | ETD01852 | 60 | 1 | 0.671 | 0.565 |
| 8 | 4 | ETD01853 | 60 | 1 | 2.111 | 2.185 |
| 9 | 4 | ETD01856 | 60 | 1 | 1.436 | 1.343 |
| 10 | 4 | ETD01857 | 60 | 1 | 0.985 | 0.884 |

TABLE 46
PT and APTT Times in Mice treated with siRNAs targeting FGG

| | | | | Mean PT | Mean APPT |
|---|---|---|---|---|---|
| | | | Dose | (sec) | (sec) |
| Group | n | Treatment | (ug) | Day 10 | Day 10 |
| 1 | 4 | PBS | 0 | 27.8 | 53.825 |
| 2 | 4 | ETD01818 | 60 | 21.975 | 44.85 |
| 3 | 4 | ETD01839 | 60 | 38.525 | 79.275 |
| 4 | 4 | ETD01841 | 60 | 29.425 | 71.725 |
| 5 | 4 | ETD01849 | 60 | 20.6 | 64.875 |
| 6 | 4 | ETD01851 | 60 | 20.025 | 63.375 |
| 7 | 4 | ETD01852 | 60 | 23.325 | 82.3 |
| 8 | 4 | ETD01853 | 60 | 20.475 | 70.1 |
| 9 | 4 | ETD01856 | 60 | 21.5 | 65.2 |
| 10 | 4 | ETD01857 | 60 | 22.75 | 66.75 |

### Example 19. Screening of siRNAs Targeting Human FGG mRNA in Mice Transfected with AAV8-TBG-h-FGG

[0461] Several siRNAs designed to be cross-reactive with human, cynomolgus monkey, rat and mouse FGG mRNA were tested for activity in mice following transfection with an adeno-associated viral vector. The siRNAs were attached to the GalNAc ligand ETL17. The siRNA sequences are shown in Table 47A, where “Nf” is a 2′ fluoro-modified nucleoside, “n” is a 2′ O-methyl modified nucleoside, and “s” is a phosphorothioate linkage.

[0462] Six to eight week old female mice (C57Bl/6) were injected with 10 μL of a recombinant adeno-associated virus 8 (AAV8) vector (2.4×10E13 genome copies/mL) by the retroorbital route on Day −14. The recombinant AAV8 contains the open reading frame and a portion of the 5′ and 3′UTRs of the human FGG sequence (ENST00000404648) under the control of the human thyroxine binding globulin promoter in an AAV2 backbone packaged in AAV8 capsid (AAV8-TBG-h-FGG). On Day 0, infected mice (n=5) were given a subcutaneous injection of a single 60 μg or 100 ug dose of a GalNAc-conjugated siRNA or PBS as vehicle control.

[0463] Mice were euthanized on Day 10 after subcutaneous injection and a liver sample from each was collected and placed in RNAlater (ThermoFisher Catalog #AM7020) until processing. Total liver RNA was prepared by homogenizing the liver tissue in homogenization buffer (Maxwell RSC simplyRNA Tissue Kit) using a Percellys 24 tissue homogenizer (Bertin Instruments) set at 5000 rpm for two 10 second cycles. Total RNA from the lysate was purified on a Maxwell RSC 48 platform (Promega Corporation) according to the manufacturer's recommendations. Preparation of cDNA was performed using Quanta qScript cDNA SuperMix (VWR, Catalog #95048-500) according to the manufacturer's instructions. The relative levels of liver MTRESJ mRNA were assessed by RT-qPCR in triplicate on a QuantStudio™ 6 Pro Real-Time PCR System using TaqMan assays for human FGG (ThermoFisher, assay #Hs00241038 ml), or mouse FGG (ThermoFisher, assay #Mm00513575_m1) and the mouse housekeeping gene PPIA (ThermoFisher, assay #Mm02342430_g1) and PerfeCTa® qPCR FastMix®, Low ROX™ (VWR, Catalog #101419-222). Data were normalized to the mean FGG mRNA level in animals receiving PBS. Mice injected with ETD01818, ETD01839, and ETD01841 had substantial reductions in mean liver mouse FGG mRNA on Day 10 relative to mice receiving PBS at both 60 ug and 100 ug doses. Results are shown in Table 48. Mice injected with ETD01818, ETD01839, and ETD01841 had substantial reductions in mean liver human FGG mRNA on Day 10 relative to mice receiving PBS at both 60 ug and 100 ug doses. Results are shown in Table 49.

[0464] On Day 0 (prior to dosing), 7 and Day 10 blood was collected into tubes with 0.2 mL sodium citrate for collection of plasma. Plasma samples were analyzed for fibrinogen levels by ELISA (Molecular Innovations Mouse Fibrinogen Antigen ELISA kit, Cat #MFBGNKT). Results are shown in Table 50.

[0465] On Day 14 blood was collected into tubes with 0.2 mL sodium citrate for collection of plasma. Plasma samples were analyzed for PT and APTT at IDEXX Laboratories (IDEXX Laboratories, Test #6005). Results are shown in Table 51. Mice injected with ETD01818, ETD01839, and ETD01841 had dose dependent increase in PT and APPT times on Day 7 and 10 relative to mice receiving PBS.

TABLE 47A
Example siRNA Sequences

| | | Sense Strand | | Antisense |
|---|---|---|---|---|
| | SEQ | Sequence | SEQ | Strand |
| | ID | (5′-3′) with | ID | Sequence |
| ETD# | NO | GalNAc moiety | NO | (5′-3′) |
| ETD01818 | 3650 | [ETL17]sgaugAf | 3686 | usAfscUfaCfcG |
| | | AfaGfAfuucggua | | faAfuCfuUfuCf |
| | | guasusu | | aUfcsusu |
| ETD01839 | 3652 | [ETL17]sgaugAf | 3688 | usAfscuaCfcGf |
| | | AfaGfAfuucggua | | aAfuCfuUfuCfa |
| | | guasusu | | Ufcsusu |
| ETD01841 | 3654 | [ETL17]sgaugAf | 3690 | usAfscUfacCfg |
| | | AfaGfAfuucggua | | aAfuCfuUfuCfa |
| | | guasusu | | Ufcsusu |

TABLE 47B
Example siRNA BASE Sequences

| | | Sense | | Antisense |
|---|---|---|---|---|
| | | Strand | | Strand |
| | | Base | | Base |
| | | Sequence | | Sequence |
| | SEQ | (5′ to 3′), | SEQ | (5′ to 3′), |
| siRNA | ID | without 3′ | ID | without 3′ |
| Name | NO: | overhangs | NO: | overhangs |
| ETD01818 | 3722 | UACCAAGGTGG | 3758 | UACUACCGAAUC |
| | | CACUUACA | | UUUCAUC |
| ETD01839 | 3724 | GAUGAAAGAUU | 3760 | UACUACCGAAUC |
| | | CGGUAGUA | | UUUCAUC |
| ETD01841 | 3726 | GAAGAUUCAUU | 3762 | UACUACCGAAUC |
| | | UGAUAAGA | | UUUCAUC |

TABLE 48
Relative mouse FGG mRNA Levels in Livers of Mice

| | | | Dose | Mean mouse MTRES1 mRNA |
|---|---|---|---|---|
| Group | n | Treatment | (ug) | (Normalized to Group 1, Day 10) |
| 1 | 5 | PBS | 0 | 1.00 |
| 2 | 5 | ETD01818 | 60 | 0.36 |
| 3 | 5 | ETD01818 | 100 | 0.19 |
| 4 | 5 | ETD01839 | 60 | 0.24 |
| 5 | 5 | ETD01839 | 100 | 0.11 |
| 6 | 5 | ETD01841 | 60 | 0.17 |
| 7 | 5 | ETD01841 | 100 | 0.10 |

TABLE 49
Relative human FGG mRNA Levels in Livers of Mice

| | | | Dose | Mean human MTRES1 mRNA |
|---|---|---|---|---|
| Group | n | Treatment | (ug) | (Normalized to Group 6, Day 10) |
| 1 | 5 | PBS | 0 | 1.00 |
| 2 | 5 | ETD01818 | 60 | 0.56 |
| 3 | 5 | ETD01818 | 100 | 0.54 |
| 4 | 5 | ETD01839 | 60 | 0.49 |
| 5 | 5 | ETD01839 | 100 | 0.47 |
| 6 | 5 | ETD01841 | 60 | 0.71 |
| 7 | 5 | ETD01841 | 100 | 0.61 |

TABLE 50
Fibrinogen Levels in Plasma of Mice
treated with siRNAs targeting FGG

| | | | | Mean Fibrinogen | | |
|---|---|---|---|---|---|---|
| | | | Dose | (Normalized, Day 0) | | |
| Group | n | Treatment | (ug) | Day 0 | Day 4 | Day 10 |
| 1 | 5 | PBS | 0 | 1 | 0.901 | 0.914 |
| 2 | 5 | ETD01818 | 60 | 1 | 0.646 | 0.373 |
| 3 | 5 | ETD01818 | 100 | 1 | 0.520 | 0.205 |
| 4 | 5 | ETD01839 | 60 | 1 | 0.486 | 0.200 |
| 5 | 5 | ETD01839 | 100 | 1 | 0.370 | 0.090 |
| 6 | 5 | ETD01841 | 60 | 1 | 0.402 | 0.132 |
| 7 | 5 | ETD01841 | 100 | 1 | 0.436 | 0.100 |

TABLE 51
PT and APTT Times in Mice treated with siRNAs targeting FGG

| | | | | Mean PT | Mean APPT |
|---|---|---|---|---|---|
| | | | Dose | (sec) | (sec) |
| Group | n | Treatment | (ug) | Day 10 | Day 10 |
| 1 | 5 | PBS | 0 | 14.44 | 40.1 |
| 2 | 5 | ETD01818 | 60 | 16.9 | 39.08 |
| 3 | 5 | ETD01818 | 100 | 21.06 | 39.64 |
| 4 | 5 | ETD01839 | 60 | 20.64 | 50.52 |
| 5 | 5 | ETD01839 | 100 | 28.68 | 52.62 |
| 6 | 5 | ETD01841 | 60 | 19.32 | 36.18 |
| 7 | 5 | ETD01841 | 100 | 30.72 | 61.8 |

### Example 20. Determining the Activity of siRNAs Targeting FGG in Non-Human Primates

[0466] This study was conducted at Pharmalegacy Laboratories, Inc. on behalf of Empirico. Three groups (n=3/group) of 4-7 year old male cynomolgus monkeys (Zhaoqing Chuangyao Biotechnology Co., Ltd and Guangzhou Xianngguan Biotechnology Co., Ltd) were utilized for this study.

[0467] On Study Day 0, Group 1 cynomolgus monkeys were injected with 2 mg/kg ETD01839 (sense strand SEQ ID NO: 3652; antisense strand SEQ ID NO: 3688) at a concentration of 10 mg/mL, Group 2 cynomolgus monkeys were injected with 2 mg/kg ETD01841 (sense strand SEQ ID NO: 3654; antisense strand SEQ ID NO: 3690) at a concentration of 10 mg/mL, Group 3 cynomolgus monkeys were injected with 2 mg/kg ETD01926 (sense strand SEQ ID NO: 3675; antisense strand SEQ ID NO: 3711) at a concentration of 10 mg/mL. All animals had no abnormal clinical symptoms and well tolerated with single subcutaneous dose at 2 mg/kg of ETD01839, ETD01841 and ETD01926.

[0468] On Study Days −8, −2, 7, 14, 21 and Day 28 body weights were recorded. Results are shown in Table 52.

TABLE 52
Body Weights in Cynomolgus Monkeys treated
with siRNAs targeting FGG (kg)

| Treatment | Animal | | Body Weight (kg) | | | | | |
|---|---|---|---|---|---|---|---|---|
| group | No. | Gender | −8 | −2 | 7 | 14 | 21 | 28 |
| G1: | 101 | Male | 5.0 | 5.3 | 5.3 | 5.3 | 5.2 | 5.3 |
| ETD01839 | 102 | Male | 4.8 | 5.6 | 5.6 | 5.6 | 4.7 | 4.7 |
| | 103 | Male | 4.0 | 4.3 | 4.3 | 4.4 | 4.1 | 4.2 |
| G2: | 201 | Male | 5.2 | 5.7 | 5.7 | 5.6 | 5.2 | 5.3 |
| ETD01841 | 202 | Male | 4.5 | 5.1 | 5.1 | 5.2 | 4.2 | 4.3 |
| | 203 | Male | 5.1 | 5.4 | 5.4 | 5.3 | 5.4 | 5.3 |
| G3: | 301 | Male | 5.9 | 6.2 | 6.2 | 6.1 | 5.6 | 5.7 |
| ETD01926 | 302 | Male | 6.5 | 6.8 | 6.8 | 6.8 | 6.8 | 6.6 |
| | 303 | Male | 4.0 | 4.8 | 4.8 | 4.7 | 4.3 | 4.3 |

[0469] On Study Day −2 and Day 28, the animals were anesthetized with Zoletil (1.5-5.0 mg/kg, i.m.) and xylazine (0.5-2.0 mg/kg, i.m.) and 3-4 mg liver biopsy was collected. The biopsy was then placed in 10 v/v RNAlater in 20 seconds and stored for 24 hrs at 4° C., the RNAlater™ Stabilization Solution (Thermo Fisher, Catalog #AM7020) was then removed and the liver tissue was stored in freezer until they were shipped to Empirico. There were no abnormal clinical observations for all animals after liver biopsy collection on Day −2 or Day 28. The liver samples were processed in homogenization buffer (Maxwell RSC simplyRNA Tissue Kit) using Soft Tissue Homogenizing Kit CK14 (Bertin Instruments, catalog #P000933-LYSK0-A) in a Percellys 24 tissue homogenizer (Bertin Instruments) set at 5000 rpm for two 10 second cycles. Total RNA from the liver lysate was purified on a Maxwell RSC 48 platform (Promega Corporation) according to the manufacturer's recommendations. Preparation of cDNA was performed using Quanta qScript cDNA SuperMix (VWR, Catalog #95048-500) according to the manufacturer's instructions. The relative level of FGG mRNA in each Study Day 28 liver biopsy sample was assessed by RT-qPCR on a QuantStudio 6 Pro instrument (Applied Biosystems) using TaqMan assays for cyno FGG (ThermoFisher, assay #Mf02793821_m1) and the cyno housekeeping gene ACTB (ThermoFisher, assay #Mf04354341_g1), and then normalized to the mean value of the Study Day −2 pre-dose liver biopsy using the delta-delta Ct method. Animals treated with ETD01839, ETD01841 or ETD01926 showed decreased liver FGG mRNA levels on Study Day 28 compared to liver biopsies obtained from the same animals on Study Day −2. Results are shown in Table 53.

TABLE 53
Day 28 FGG mRNA liver levels in Cynomolgus Monkeys
treated with siRNAs targeting FGG

| | | | Relative Liver | | | |
|---|---|---|---|---|---|---|
| | | | FGG mRNA Level | | | |
| Treatment | Animal | | Day | Day −2 | Day | Day 28 |
| group | No. | Gender | −2 | Mean | 28 | Mean |
| G1: | 101 | Male | 1.961 | 1.00 | 0.533 | 0.65 |
| ETD01839 | 102 | Male | 0.322 | | 0.812 | |
| | 103 | Male | 1.586 | | 0.649 | |
| G2: | 201 | Male | 2.125 | 1.00 | 0.38 | 0.34 |
| ETD01841 | 202 | Male | 0.379 | | 0.383 | |
| | 203 | Male | 1.242 | | 0.274 | |
| G3: | 301 | Male | 1.62 | 1.00 | 0.265 | 0.23 |
| ETD01926 | 302 | Male | 3.462 | | 0.214 | |
| | 303 | Male | 0.178 | | 0.21 | |

[0470] On Study Days −2, −8, 7, 14, 21, and Day 28 blood was collected into tubes with 0.2 mL sodium citrate for collection of plasma. Plasma samples were analyzed for PT and APTT at Pharmalegacy Laboratories, Inc. and the remaining plasma samples were stored in a freezer until they were shipped to Empirico. Plasma sample were then transferred to IDEXX Laboratories and plasma fbrinogen levels were measured by the Clauss method (IDEXX Laboratories, Test #6308). Results are shown in Table 54-55. Animals treated with ETD01839, ETD01841 or ETD01926 showed a decrease in plasma fibrinogen starting on Study Day 7 though Study Day 28 when compared to Study Day −8 and Study Day −2, prior to treatment. Results are shown in Table 56.

TABLE 54
Prothrombin time in Cynomolgus
Monkeys treated with siRNAs targeting FGG

| Treatment | Animal | | PT (sec) | | | | | |
|---|---|---|---|---|---|---|---|---|
| group | No. | Gender | −8 | −2 | 7 | 14 | 21 | 28 |
| G1: | 101 | Male | 9.6 | 9.8 | 10.1 | 11.9 | 11.6 | 11.6 |
| ETD01839 | 102 | Male | 10.3 | 10.2 | 10.3 | 11.3 | 10.2 | 11.7 |
| | 103 | Male | 9.7 | 10.3 | 9.8 | 10.9 | 11 | 10.7 |
| G2: | 201 | Male | 9.3 | 9.9 | 10.5 | 12.3 | 12 | 12.4 |
| ETD01841 | 202 | Male | 9.2 | 9.9 | 10.4 | 11.9 | 12 | 11.8 |
| | 203 | Male | 9.7 | 9.5 | 9.3 | 9.9 | 6.6 | 10.2 |
| G3: | 301 | Male | 9.5 | 10 | 9.7 | 10.6 | 10.7 | 11.1 |
| ETD01926 | 302 | Male | 9.1 | 10 | 10.2 | 11.1 | 11.3 | 11.9 |
| | 303 | Male | 9.8 | 10.6 | 10.3 | 11.3 | 11.6 | 11.4 |

TABLE 55
Activated Partial Thromboplastin time in Cynomolgus
Monkeys treated with siRNAs targeting FGG

| Treatment | Animal | | APTT (sec) | | | | | |
|---|---|---|---|---|---|---|---|---|
| group | No. | Gender | −8 | −2 | 7 | 14 | 21 | 28 |
| G1: | 101 | Male | 18.7 | 20.5 | 19.6 | 19.2 | 19.2 | 17.8 |
| ETD01839 | 102 | Male | 19.4 | 20.2 | 19.7 | 20.1 | 19.8 | 17.9 |
| | 103 | Male | 18.7 | 20.8 | 19.5 | 19.4 | 20.1 | 18.6 |
| G2: | 201 | Male | 18.5 | 18.8 | 18.9 | 18.4 | 19.5 | 17.7 |
| ETD01841 | 202 | Male | 18.4 | 20.5 | 18.4 | 17.8 | 18.6 | 17.4 |
| | 203 | Male | 22.5 | 20.6 | 19.2 | 18.6 | 19.2 | 18.7 |
| G3: | 301 | Male | 19.3 | 20.6 | 19.4 | 20.1 | 19.7 | 18.5 |
| ETD01926 | 302 | Male | 15.5 | 18.2 | 16.8 | 16.9 | 16.6 | 15.5 |
| | 303 | Male | 21.7 | 22.4 | 22.4 | 23.4 | 21.2 | 20.6 |

TABLE 56
Plasma fibrinogen levels in Cynomolgus Monkeys
treated with siRNAs targeting FGG

| | | | Fibrinogen Plasma | | | | | |
|---|---|---|---|---|---|---|---|---|
| Treatment | Animal | | Level (Clauss method, mg/dL) | | | | | |
| group | No. | Gender | −8 | −2 | 7 | 14 | 21 | 28 |
| G1: | 101 | Male | N/A | 373 | 253 | 148 | 151 | 81 |
| ETD01839 | 102 | Male | 478 | 391 | 259 | 124 | 222 | 203 |
| | 103 | Male | 343 | 419 | 248 | 188 | 80 | 208 |
| G2: | 201 | Male | 277 | 316 | 180 | 117 | 155 | 120 |
| ETD01841 | 202 | Male | 581 | 272 | 169 | 126 | 148 | 125 |
| | 203 | Male | 674 | 519 | 286 | 295 | 82 | 318 |
| G3: | 301 | Male | 598 | 418 | 464 | 234 | 234 | 227 |
| ETD01926 | 302 | Male | 663 | 390 | 479 | 154 | 140 | 129 |
| | 303 | Male | 339 | 311 | 241 | 188 | 174 | 158 |

[0471] On Study Days −8, −2, 7, 14, 21, and Day 28 blood was collected into tubes with no anti-coagulant and serum collected. Clinical chemistry parameters containing ALT, AST, ALP, DBIL, TBIL, GLU, UREA, CREA, TP and CGT were analyzed at Pharmalegacy Laboratories, Inc.

[0472] Results are shown in Table 57-66.

TABLE 57
Clinical Chemistry ALT results of Cynomolgus Monkeys
treated with siRNAs targeting FGG

| Treatment | Animal | | ALT (U/L) | | | | | |
|---|---|---|---|---|---|---|---|---|
| group | No. | Gender | −8 | −2 | 7 | 14 | 21 | 28 |
| G1: | 101 | Male | 60 | 43 | 52 | 50 | 67 | 41 |
| ETD01839 | 102 | Male | 40 | 29 | 28 | 32 | 33 | 49 |
| | 103 | Male | 55 | 42 | 46 | 39 | 41 | 40 |
| G2: | 201 | Male | 68 | 63 | 59 | 51 | 59 | 35 |
| ETD01841 | 202 | Male | 159 | 88 | 81 | 55 | 52 | 48 |
| | 203 | Male | 55 | 39 | 46 | 39 | 37 | 64 |
| G3: | 301 | Male | 66 | 42 | 41 | 40 | 40 | 43 |
| ETD01926 | 302 | Male | 71 | 55 | 106 | 70 | 57 | 25 |
| | 303 | Male | 44 | 40 | 59 | 52 | 43 | 59 |

TABLE 58
Clinical Chemistry AST results of Cynomolgus
Monkeys treated with siRNAs targeting FGG

| Treatment | Animal | | AST (U/L) | | | | | |
|---|---|---|---|---|---|---|---|---|
| group | No. | Gender | −8 | −2 | 7 | 14 | 21 | 28 |
| G1: | 101 | Male | 61 | 48 | 48 | 55 | 99 | 43 |
| ETD01839 | 102 | Male | 32 | 35 | 35 | 33 | 41 | 41 |
| | 103 | Male | 50 | 62 | 61 | 53 | 69 | 43 |
| G2: | 201 | Male | 51 | 54 | 56 | 52 | 53 | 30 |
| ETD01841 | 202 | Male | 54 | 56 | 54 | 44 | 51 | 49 |
| | 203 | Male | 36 | 32 | 34 | 31 | 39 | 48 |
| G3: | 301 | Male | 44 | 51 | 43 | 46 | 43 | 56 |
| ETD01926 | 302 | Male | 38 | 62 | 50 | 46 | 44 | 30 |
| | 303 | Male | 32 | 33 | 41 | 37 | 38 | 61 |

TABLE 59
Clinical Chemistry ALP results of Cynomolgus
Monkeys treated with siRNAs targeting FGG

| Treatment | Animal | | ALP(U/L) | | | | | |
|---|---|---|---|---|---|---|---|---|
| group | No. | Gender | −8 | −2 | 7 | 14 | 21 | 28 |
| G1: | 101 | Male | 580 | 593 | 597 | 612 | 664 | 586 |
| ETD01839 | 102 | Male | 292 | 326 | 318 | 292 | 335 | 457 |
| | 103 | Male | 389 | 390 | 397 | 349 | 406 | 687 |
| G2: | 201 | Male | 590 | 667 | 591 | 572 | 610 | 289 |
| ETD01841 | 202 | Male | 509 | 523 | 533 | 553 | 535 | 619 |
| | 203 | Male | 263 | 288 | 308 | 266 | 289 | 618 |
| G3: | 301 | Male | 678 | 692 | 663 | 606 | 659 | 373 |
| ETD01926 | 302 | Male | 431 | 469 | 895 | 652 | 490 | 271 |
| | 303 | Male | 481 | 495 | 543 | 546 | 569 | 636 |

TABLE 60
Clinical Chemistry DBIL results of Cynomolgus
Monkeys treated with siRNAs targeting FGG

| Treatment | Animal | | DBIL (μmol/L) | | | | | |
|---|---|---|---|---|---|---|---|---|
| group | No. | Gender | −8 | −2 | 7 | 14 | 21 | 28 |
| G1: | 101 | Male | 0.4 | 0.4 | 0.7 | 0.7 | 1.1 | 0.6 |
| ETD01839 | 102 | Male | 0.4 | 0.4 | 0.7 | 0.7 | 0.8 | 0.5 |
| | 103 | Male | 0.9 | 0.5 | 0.7 | 0.7 | 0.7 | 0.7 |
| G2: | 201 | Male | 0.2 | 0.8 | 1.1 | 0.8 | 0.7 | 0.8 |
| ETD01841 | 202 | Male | 0.5 | 0.6 | 0.7 | 0.8 | 0.6 | 0.6 |
| | 203 | Male | 0.4 | 0.5 | 0.9 | 0.7 | 0.8 | 0.8 |
| G3: | 301 | Male | 0.6 | 0.7 | 0.7 | 0.7 | 0.8 | 0.4 |
| ETD01926 | 302 | Male | 0.5 | 0.8 | 1.1 | 0.5 | 0.9 | 0.7 |
| | 303 | Male | 0.4 | 0.5 | 1.2 | 1.3 | 1 | 0.8 |

TABLE 61
Clinical Chemistry TBIL results of Cynomolgus
Monkeys treated with siRNAs targeting FGG

| Treatment | Animal | | TBIL (μmol/L) | | | | | |
|---|---|---|---|---|---|---|---|---|
| group | No. | Gender | −8 | −2 | 7 | 14 | 21 | 28 |
| G1: | 101 | Male | 1 | 0.3 | 1.1 | 1.3 | 1.6 | 1.6 |
| ETD01839 | 102 | Male | 0.2 | 0 | 1 | 1.1 | 1.5 | 1.5 |
| | 103 | Male | 0.3 | 0.1 | 0.7 | 1.2 | 0.8 | 1.4 |
| G2: | 201 | Male | 0.8 | 1 | 1.6 | 1.5 | 1.3 | 1.4 |
| ETD01841 | 202 | Male | 1.2 | 0.7 | 0.9 | 1.2 | 0.8 | 0.9 |
| | 203 | Male | 0.1 | 0.5 | 1 | 0.8 | 1.1 | 2.1 |
| G3: | 301 | Male | 0.8 | 0.4 | 0.7 | 1.4 | 0.9 | 0.8 |
| ETD01926 | 302 | Male | 0.6 | 1.5 | 1.9 | 1.9 | 1.2 | 1.5 |
| | 303 | Male | 0.1 | 1.1 | 1.9 | 2.2 | 1.7 | 2.3 |

TABLE 62
Clinical Chemistry GLU results of Cynomolgus
Monkeys treated with siRNAs targeting FGG

| Treatment | Animal | | GLU (mmol/L) | | | | | |
|---|---|---|---|---|---|---|---|---|
| group | No. | Gender | −8 | −2 | 7 | 14 | 21 | 28 |
| G1: | 101 | Male | 5.8 | 3.1 | 5.7 | 5.2 | 2.3 | 5.5 |
| ETD01839 | 102 | Male | 5.1 | 3.4 | 4.3 | 4.3 | 2.7 | 3.8 |
| | 103 | Male | 4 | 2.6 | 3.8 | 3.1 | 2.9 | 3.1 |
| G2: | 201 | Male | 4.2 | 3.1 | 5.7 | 4.6 | 3.8 | 3.8 |
| ETD01841 | 202 | Male | 7.3 | 4.1 | 5.4 | 4.3 | 3.8 | 4.7 |
| | 203 | Male | 3.7 | 2.7 | 4.5 | 3.2 | 2.6 | 5.3 |
| G3: | 301 | Male | 5.5 | 2.8 | 2.8 | 3.2 | 3.3 | 3.2 |
| ETD01926 | 302 | Male | 4.5 | 2.5 | 4 | 3.2 | 3.3 | 5 |
| | 303 | Male | 5.1 | 3.6 | 4.1 | 3.8 | 3.3 | 4.1 |

TABLE 63
Clinical Chemistry UREA results of Cynomolgus
Monkeys treated with siRNAs targeting FGG

| Treatment | Animal | | UREA (mmol/L) | | | | | |
|---|---|---|---|---|---|---|---|---|
| group | No. | Gender | −8 | −2 | 7 | 14 | 21 | 28 |
| G1: | 101 | Male | 6.04 | 4.93 | 5.19 | 6.38 | 6.62 | 6.15 |
| ETD01839 | 102 | Male | 6.26 | 5.58 | 5.73 | 5.54 | 6.36 | 6.57 |
| | 103 | Male | 7.32 | 6.82 | 8.03 | 7.17 | 7.21 | 8.39 |
| G2: | 201 | Male | 6.12 | 7.14 | 6.39 | 6.6 | 6.33 | 7.84 |
| ETD01841 | 202 | Male | 5.87 | 5.48 | 6.46 | 5.87 | 6.2 | 5.75 |
| | 203 | Male | 8.72 | 7.07 | 8.37 | 8.59 | 9.2 | 6.22 |
| G3: | 301 | Male | 8.18 | 7.28 | 8.57 | 8.59 | 7.53 | 6.62 |
| ETD01926 | 302 | Male | 5.8 | 6.1 | 6.15 | 6.6 | 7.05 | 5.77 |
| | 303 | Male | 6.17 | 5.69 | 6.53 | 7.07 | 5.98 | 6.86 |

TABLE 64
Clinical Chemistry CREA results of Cynomolgus
Monkeys treated with siRNAs targeting FGG

| Treatment | Animal | | CREA (μmol/L) | | | | | |
|---|---|---|---|---|---|---|---|---|
| group | No. | Gender | −8 | −2 | 7 | 14 | 21 | 28 |
| G1: | 101 | Male | 56 | 52 | 58 | 57 | 59 | 65 |
| ETD01839 | 102 | Male | 63 | 62 | 66 | 67 | 62 | 92 |
| | 103 | Male | 69 | 68 | 69 | 67 | 67 | 79 |
| G2: | 201 | Male | 63 | 60 | 60 | 61 | 60 | 76 |
| ETD01841 | 202 | Male | 66 | 60 | 62 | 65 | 63 | 65 |
| | 203 | Male | 73 | 67 | 82 | 75 | 77 | 60 |
| G3: | 301 | Male | 72 | 71 | 83 | 77 | 70 | 66 |
| ETD01926 | 302 | Male | 93 | 89 | 87 | 87 | 86 | 66 |
| | 303 | Male | 61 | 56 | 63 | 60 | 58 | 57 |

TABLE 65
Clinical Chemistry TP results of Cynomolgus
Monkeys treated with siRNAs targeting FGG

| Treatment | Animal | | TP (g/L) | | | | | |
|---|---|---|---|---|---|---|---|---|
| group | No. | Gender | −8 | −2 | 7 | 14 | 21 | 28 |
| G1: | 101 | Male | 76.9 | 73.3 | 79 | 71 | 70.3 | 75.1 |
| ETD01839 | 102 | Male | 66.8 | 68.3 | 68.1 | 63.9 | 68.1 | 81.3 |
| | 103 | Male | 80.3 | 78.2 | 79.2 | 69.5 | 77.5 | 76.5 |
| G2: | 201 | Male | 74 | 78.3 | 75.6 | 67.8 | 73.3 | 73.8 |
| ETD01841 | 202 | Male | 77.9 | 80.5 | 82.1 | 80.1 | 75.2 | 84.7 |
| | 203 | Male | 72.3 | 73.4 | 78.9 | 69.8 | 70.4 | 74.8 |
| G3: | 301 | Male | 71.6 | 75.1 | 77.4 | 70.2 | 68.5 | 76.9 |
| ETD01926 | 302 | Male | 79.9 | 76.5 | 83.9 | 81.3 | 75 | 71 |
| | 303 | Male | 71.1 | 70.7 | 74.3 | 71.8 | 70.1 | 75 |

TABLE 66
Clinical Chemistry CGT results of Cynomolgus
Monkeys treated with siRNAs targeting FGG

| Treatment | Animal | | CGT (U/L) | | | | | |
|---|---|---|---|---|---|---|---|---|
| group | No. | Gender | −8 | −2 | 7 | 14 | 21 | 28 |
| G1: | 101 | Male | 81 | 77 | 81 | 81 | 80 | 70 |
| ETD01839 | 102 | Male | 83 | 81 | 97 | 90 | 100 | 88 |
| | 103 | Male | 111 | 111 | 104 | 97 | 109 | 118 |
| G2: | 201 | Male | 86 | 94 | 89 | 85 | 89 | 59 |
| ETD01841 | 202 | Male | 123 | 127 | 117 | 123 | 117 | 139 |
| | 203 | Male | 51 | 55 | 59 | 51 | 50 | 90 |
| G3: | 301 | Male | 109 | 115 | 107 | 103 | 106 | 107 |
| ETD01926 | 302 | Male | 60 | 56 | 135 | 112 | 93 | 94 |
| | 303 | Male | 59 | 61 | 65 | 64 | 65 | 79 |

### Example 21. Discovery Toxicity siRNAs Targeting Human, Cynomolgous Monkey, Rat and Mouse FGG in Mice

[0473] Several siRNAs designed to be cross-reactive with human, cynomolgous monkey and mouse FGG mRNA were tested for toxicity in mice. The siRNAs were attached to the GalNAc ligand ETL17. The siRNA sequences are shown in Table 66A, where Nf is a 2′ fluoro-modified nucleoside, n is a 2′ O-methyl modified nucleoside, and “s” is a phosphorothioate linkage.

[0474] Six to eight week old female mice (strain ICR, n=4) were given a subcutaneous injection on Day 0, 7, and Day 14 of a 200 ug dose of a GalNAc-conjugated siRNA or PBS as vehicle control.

[0475] Mice were euthanized on Day 14 after injection and a liver sample from each was collected and placed in RNAlater (ThermoFisher Catalog #AM7020) until processing. Total liver RNA was prepared by homogenizing the liver tissue in homogenization buffer (Maxwell RSC simplyRNA Tissue Kit) using a Percellys 24 tissue homogenizer (Bertin Instruments) set at 5000 rpm for two 10 second cycles. Total RNA from the lysate was purified on a Maxwell RSC 48 platform (Promega Corporation) according to the manufacturer's recommendations. Preparation of cDNA was performed using Quanta qScript cDNA SuperMix (VWR, Catalog #95048-500) according to the manufacturer's instructions. The relative levels of liver FGG mRNA were assessed by RT-qPCR in triplicate on a QuantStudio™ 6 Pro Real-Time PCR System using TaqMan assays for mouse FGG (ThermoFisher, assay #Mm00513575_m1) and the mouse housekeeping gene PPIA (ThermoFisher, assay #Mm02342430_g1) and PerfeCea® qPCR FastMix®, Low ROX™ (VWR, Catalog #101419-222). Data were normalized to the mean EGG mRNA level in animals receiving PBS. Results are shown in Table 67

[0476] On Day 0 (prior to dosing) and Day 21 blood was collected into tubes with 0.2 mL sodium citrate for collection of plasma. Plasma samples were analyzed for fibrinogen levels by ELISA (Molecular Innovations Mouse Fibrinogen Antigen ELISA kit, Cat #MFBGNKT). Results are shown in Table 68.

[0477] On Day 2, 9, and Day 21 blood was collected into tubes with no anti-coagulant abd serum collected. Clinical chemistry parameters containing ALT, AST, ALP, TBLL, GLU, BUN, and CREAT were analyzed at IDEXX Laboratories (IDEXX Laboratories, Test #62849). Results are shown in Table 69-74.

TABLE 66A
Example siRNA Sequences

| | | Sense Strand | | Antisense |
|---|---|---|---|---|
| | SEQ | Sequence | SEQ | Strand |
| | ID | (5′-3′) with | ID | Sequence |
| ETD# | NO | GalNAc moiety | NO | (5′-3′) |
| ETD01818 | 3641 | [ETL1]gsasugAf | 3677 | usAfscUfaCfcGfa |
| | | AfaGfAfuucggua | | AfuCfuUfuCfaUfc |
| | | guasusu | | susu |
| ETD01839 | 3642 | [ETL1]gsasagAf | 3678 | usAfscuaCfcGfaA |
| | | uucAfuuugauaag | | fuCfuUfuCfaUfcs |
| | | asusu | | usu |
| ETD01841 | 3643 | [ETL1]sgaugAfA | 3679 | usAfscUfacCfgaA |
| | | faGfAfuucgGfua | | fuCfuUfuCfaUfcs |
| | | Gfuasusu | | usu |
| ETD01852 | 3644 | [ETL1]sgaugAfA | 3680 | usGfsaUfgUfgAfa |
| | | faGfdAuUfCfggU | | AfaAfcUfuGfuCfa |
| | | faguasusu | | susu |
| ETD01926 | 3645 | [ETL1]sgaAfGfa | 3681 | usGfsaUfguGfaaa |
| | | uucAfuuugAfuAf | | aAfcUfuGfuCfasu |
| | | Afgasusu | | su |

TABLE 66B
Example siRNA BASE Sequences

| | | Sense Strand | | Antisense |
|---|---|---|---|---|
| | | Base | | Strand Base |
| | | Sequence | | Sequence |
| | SEQ | (5′ to 3′), | SEQ | (5′ to 3′), |
| siRNA | ID | without 3′ | ID | without 3′ |
| Name | NO: | overhangs | NO: | overhangs |
| ETD0181 | 3641 | GAUGAAAGAUUCG | 3677 | UACUACCGAAUCU |
| 8 | | GUAGUAUU | | UUCAUCUU |
| ETD0183 | 3642 | GAUGAAAGAUUCG | 3678 | UACUACCGAAUCU |
| 9 | | GUAGUAUU | | UUCAUCUU |
| ETD0184 | 3643 | GAUGAAAGAUUCG | 3679 | UACUACCGAAUCU |
| 1 | | GUAGUAUU | | UUCAUCUU |
| ETD0185 | 3644 | UGACAAGUUUUUC | 3680 | UGAUGUGAAAAAC |
| 2 | | ACAUCAUU | | UUGUCAUU |
| ETD0192 | 3645 | UGACAAGUUUUUC | 3681 | UGAUGUGAAAAAC |
| 6 | | ACAUCAUU | | UUGUCAUU |

TABLE 67
Relative FGG mRNA Levels in Livers of Mice

| | | | | Mean FGG mRNA |
|---|---|---|---|---|
| | | | Dose | (Normalized to |
| Group | n | Treatment | (ug) | Group 1, Day 14) |
| 1 | 4 | PBS | 0 | 1.00 |
| 2 | 4 | ETD01818 | 200 ug × 3 | 0.10 |
| 3 | 4 | ETD01839 | 200 ug × 3 | 0.04 |
| 4 | 4 | ETD01841 | 200 ug × 3 | 0.05 |
| 5 | 4 | ETD01852 | 200 ug × 3 | 0.10 |
| 6 | 4 | ETD01926 | 200 ug × 3 | 0.05 |

TABLE 68
Fibrinogen Levels in Plasma of Mice
treated with siRNAs targeting FGG

| | | | | Mean Fibrinogen | |
|---|---|---|---|---|---|
| | | | Dose | (Normalized, Day 0) | |
| Group | n | Treatment | (ug) | Day 0 | Day 7 |
| 1 | 4 | PBS | 0 | 1.00 | 0.63 |
| 2 | 4 | ETD01818 | 200 ug × 3 | 1.00 | 0.03 |
| 3 | 4 | ETD01839 | 200 ug × 3 | 1.00 | 0.01 |
| 4 | 4 | ETD01841 | 200 ug × 3 | 1.00 | 0.01 |
| 5 | 4 | ETD01852 | 200 ug × 3 | 1.00 | 0.15 |
| 6 | 4 | ETD01926 | 200 ug × 3 | 1.00 | 0.14 |

TABLE 69
Clinical Chemistry ALT in Mice
treated with siRNAs targeting FGG

| | | | Dose | Mean ALT (U/L) | | |
|---|---|---|---|---|---|---|
| Group | n | Treatment | (ug) | Day 2 | Day 9 | Day 21 |
| 1 | 4 | PBS | 0 | 23.25 | 24 | 27 |
| 2 | 4 | ETD01818 | 200 ug × 3 | 93.25 | 23 | 22.5 |
| 3 | 4 | ETD01839 | 200 ug × 3 | 85 | 30.75 | 27 |
| 4 | 4 | ETD01841 | 200 ug × 3 | 24.75 | 24 | 26.75 |
| 5 | 4 | ETD01852 | 200 ug × 3 | 24.25 | 33 | 30 |
| 6 | 4 | ETD01926 | 200 ug × 3 | 25.5 | 26.75 | 26.75 |

TABLE 70
Clinical Chemistry AST in Mice
treated with siRNAs targeting FGG

| | | | Dose | Mean AST (U/L) | | |
|---|---|---|---|---|---|---|
| Group | n | Treatment | (ug) | Day 2 | Day 9 | Day 21 |
| 1 | 4 | PBS | 0 | 60.5 | 53 | 64 |
| 2 | 4 | ETD01818 | 200 ug × 3 | 126 | 54.25 | 49.5 |
| 3 | 4 | ETD01839 | 200 ug × 3 | 122.25 | 56.75 | 55 |
| 4 | 4 | ETD01841 | 200 ug × 3 | 55.25 | 53 | 64 |
| 5 | 4 | ETD01852 | 200 ug × 3 | 56.25 | 60.75 | 59.25 |
| 6 | 4 | ETD01926 | 200 ug × 3 | 59.25 | 62.25 | 62 |

TABLE 71
Clinical Chemistry ALP in Mice
treated with siRNAs targeting FGG

| | | | Dose | Mean ALP (U/L) | | |
|---|---|---|---|---|---|---|
| Group | n | Treatment | (ug) | Day 2 | Day 9 | Day 21 |
| 1 | 4 | PBS | 0 | 129.75 | 118.5 | 94.25 |
| 2 | 4 | ETD01818 | 200 ug × 3 | 123.75 | 107 | 84 |
| 3 | 4 | ETD01839 | 200 ug × 3 | 115.5 | 96.75 | 109.75 |
| 4 | 4 | ETD01841 | 200 ug × 3 | 95.25 | 81 | 82 |
| 5 | 4 | ETD01852 | 200 ug × 3 | 120.25 | 118 | 101.25 |
| 6 | 4 | ETD01926 | 200 ug × 3 | 140.75 | 126.25 | 110.25 |

TABLE 72
Clinical Chemistry TBILI in Mice
treated with siRNAs targeting FGG

| | | | Dose | Mean TBILI (mg/dL) | | |
|---|---|---|---|---|---|---|
| Group | n | Treatment | (ug) | Day 2 | Day 9 | Day 21 |
| 1 | 4 | PBS | 0 | 0.175 | 0.2 | 0.2 |
| 2 | 4 | ETD01818 | 200 ug × 3 | 0.125 | 0.15 | 0.1 |
| 3 | 4 | ETD01839 | 200 ug × 3 | 0.15 | 0.2 | 0.125 |
| 4 | 4 | ETD01841 | 200 ug × 3 | 0.15 | 0.2 | 0.125 |
| 5 | 4 | ETD01852 | 200 ug × 3 | 0.1 | 0.15 | 0.15 |
| 6 | 4 | ETD01926 | 200 ug × 3 | 0.125 | 0.2 | 0.175 |

TABLE 73
Clinical Chemistry BUN in Mice
treated with siRNAs targeting FGG

| | | | Dose | Mean BUN (mg/dL) | | |
|---|---|---|---|---|---|---|
| Group | n | Treatment | (ug) | Day 2 | Day 9 | Day 21 |
| 1 | 4 | PBS | 0 | 25 | 25.5 | 23.5 |
| 2 | 4 | ETD01818 | 200 ug × 3 | 24.25 | 25 | 21 |
| 3 | 4 | ETD01839 | 200 ug × 3 | 22.5 | 26.5 | 20.25 |
| 4 | 4 | ETD01841 | 200 ug × 3 | 25.75 | 24.5 | 24 |
| 5 | 4 | ETD01852 | 200 ug × 3 | 26 | 25.75 | 23.75 |
| 6 | 4 | ETD01926 | 200 ug × 3 | 24 | 22 | 23 |

TABLE 74
Clinical Chemistry BUN in Mice
treated with siRNAs targeting FGG

| | | | Dose | Mean CREAT (mg/dL) | | |
|---|---|---|---|---|---|---|
| Group | n | Treatment | (ug) | Day 2 | Day 9 | Day 21 |
| 1 | 4 | PBS | 0 | 0.075 | 0 | 0.075 |
| 2 | 4 | ETD01818 | 200 ug × 3 | 0.1 | 0.025 | 0.025 |
| 3 | 4 | ETD01839 | 200 ug × 3 | 0.1 | 0.05 | 0.075 |
| 4 | 4 | ETD01841 | 200 ug × 3 | 0.175 | 0.025 | 0.05 |
| 5 | 4 | ETD01852 | 200 ug × 3 | 0.1 | 0.025 | 0.075 |
| 6 | 4 | ETD01926 | 200 ug × 3 | 0.1 | 0 | 0.075 |

### Example 22: Determining the Activity of Species Cross-Reactive siRNAs Targeting FGG in Mice

[0478] 3 groups (n=4/group) of 8-week-old male ICR mice (Invigo) were utilized in this study. On Study Day 0, Group 1 mice were injected subcutaneously with 100 μL of sterile PBS, Group 2 mice were subcutaneously injected with 60 μg of ETD01811 in 100 μL of sterile PBS, and Group 3 mice were subcutaneously injected with 200 ug ETD01818 in 100 μL of sterile PBS. On Study Day 14, the animals from all Groups were anesthetized and then euthanized. A liver sample was collected from all animals and placed in RNAlater™ Stabilization Solution (Thermo Fisher, Catalog #AM7020). The liver samples were processed in homogenization buffer (Maxwell RSC simplyRNA Tissue Kit) using Soft Tissue Homogenizing Kit CK14 (Bertin Instruments, catalog #P00093 3-LYSK0-A) in a Percellys 24 tissue homogenizer (Bertin Instruments) set at 5000 rpm for two 10 second cycles. Total RNA from the liver lysate was purified on a Maxwell RSC 48 platform (Promega Corporation) according to the manufacturer's recommendations. The relative level of FGG mRNA in each liver sample was assessed by RT-qPCR on a QuantStudio 6 Pro instrument (Applied Biosystems) using TaqMan assays for mouse FGG (ThermoFisher, assay #Mm00513575 ml) and the mouse housekeeping gene PPIA (ThermoFisher, assay #Mm02342430 g1), and then normalized to the mean value of the control mice (Group 1) using the delta-delta Ct method.

[0479] The results of the liver mRNA analyses are shown in Table 75 below. Animals treated with ETL1-targeted siRNA (ETD01811, Group 2) had 78% relative knockdown while ETL17-targeted siRNA (ETD01818, Group 3) had 83% knockdown of liver FGG mRNA levels compared with mice injected with PBS (Group 1).

TABLE 75
Day 14 FGG mRNA liver levels in mice
treated with siRNAs targeting FGG

| Group # | Treatment | Mean |
|---|---|---|
| 1 | PBS | 1.00 |
| 2 | ETD01811 | 0.22 |
| 3 | ETD01818 | 0.17 |

### Example 23: Oligonucleotide Synthesis

[0480] Oligonucleotides such as siRNAs may be synthesized according to phosphoramidite technology on a solid phase. For example, a K&A oligonucleotide synthesizer may be used. Syntheses may be performed on a solid support made of controlled pore glass (CPG, 500 Å or 600 Å, obtained from AM Chemicals, Oceanside, CA, USA). All 2′-Ome and 2′-F phosphoramidites may be purchased from Hongene Biotech (Union City, CA, USA). All phosphoramidites may be dissolved in anhydrous acetonitrile (100 mM) and molecular sieves (3 Å) may be added. 5-Benzylthio-1H-tetrazole (BTT, 250 mM in acetonitrile) or 5-Ethylthio-1H-tetrazole (ETT, 250 mM in acetonitrile) may be used as activator solution. Coupling times may be 9-18 min (e.g. with a GalNAc such as ETL17), 6 min (e.g. with 2′Ome and 2′F). In order to introduce phosphorothioate linkages, a 100 mM solution of 3-phenyl 1,2,4-dithiazoline-5-one (POS, obtained from PolyOrg, Inc., Leominster, Mass., USA) in anhydrous acetonitrile may be employed.

[0481] After solid phase synthesis, the dried solid support may be treated with a 1:1 volume solution of 40 wt. % methylamine in water and 28% ammonium hydroxide solution (Aldrich) for two hours at 30° C. The solution may be evaporated and the solid residue may be reconstituted in water and purified by anionic exchange HPLC using a TKSgel SuperQ-5PW 13u column. Buffer A may be 20 mM Tris, 5 mM EDTA, pH 9.0 and contained 20% Acetonitrile and buffer B may be the same as buffer A with the addition of 1 M sodium chloride. UV traces at 260 nm may be recorded. Appropriate fractions may be pooled then desalted using Sephadex G-25 medium.

[0482] Equimolar amounts of sense and antisense strand may be combined to prepare a duplex. The duplex solution may be prepared in 0.1×PBS (Phosphate-Buffered Saline, 1×, Gibco). The duplex solution may be annealed at 95° C. for 5 min, and cooled to room temperature slowly. Duplex concentration may be determined by measuring the solution absorbance on a UV-Vis spectrometer at 260 nm in 0.1×PBS. For some experiments, a conversion factor may be calculated from an experimentally determined extinction coefficient.

### Example 24: GalNAc Ligand for Hepatocyte Targeting of Oligonucleotides

[0483] Without limiting the disclosure to these individual methods, there are at least two general methods for attachment of multivalent N-acetylgalactosamine (GalNAc) ligands to oligonucleotides: solid or solution-phase conjugations. GalNAc ligands may be attached to solid phase resin for 3′ conjugation or at the 5′ terminus using GalNAc phosphoramidite reagents. GalNAc phosphoramidites may be coupled on solid phase as for other nucleosides in the oligonucleotide sequence at any position in the sequence. Reagents for GalNAc conjugation to oligonucleotides are shown in Table 76.

TABLE 76
GalNAc Conjugation Reagents

| Type of | |
|---|---|
| conjugation | Structure |
| Solid phase 3′ attachment where squiggly line is rest of oligonucleotide chain and right-most OH is where attachment′ to solid phase is. | [chemical structure] |
| | This GalNAc ligand may be referred to as “GalNAc23” or “GalNAc#23.” |
| Solid phase 5′ attachment phosphoramidite | [chemical structure] |
| Solid phase 5′ attachment Phosphoramidite | [chemical structure] |
| Solution phase Carboxylic acid for amide coupling anywhere on oligonucleotide | [chemical structure] |
| | Where Ac is an acetyl group or other hydroxyl protecting group that can be removed under basic, acid or reducing conditions. |

[0484] In solution phase conjugation, the oligonucleotide sequence—including a reactive conjugation site—is formed on the resin. The oligonucleotide is then removed from the resin and GalNAc is conjugated to the reactive site.

[0485] The carboxy GalNAc derivatives may be coupled to amino-modified oligonucleotides. The peptide coupling conditions are known to the skilled in the art using a carbodiimide coupling agent like DCC (N,N′-Dicyclohexylcarbodiimide), EDC (N-(3-dimethylaminopropyl)-N′-ethylcarbodiimide) or EDC·HCl (N-(3-dimethylaminopropyl)-N′-ethylcarbodiimide hydrochloride and an additive like HOBt (1-hydroxybenztriazole), HOSu (N-hydroxysuccinimide), TBTU (N,N,N′,N′-Tetramethyl-O-(benzotriazol-1-yl)uronium tetrafluoroborate, HBTU (2-(1H-benzotriazol-1-yl)-1,1,3,3-tetramethyluronium hexafluorophosphate) or HOAt (1-Hydroxy-7-azabenzotriazole and common combinations thereof such as TBTU/HOBt or HBTU/HOAt to form activated amine-reactive esters.

[0486] Amine groups may be incorporated into oligonucleotides using a number of known, commercially available reagents at the 5′ terminus, 3′ terminus or anywhere in between.

[0487] Non-limiting examples of reagents for oligonucleotide synthesis to incorporate an amino group include:
[0488] 5′ attachment:
[0489] 6-(4-Monomethoxytritylamino)hexyl-(2-cyanoethyl)-(N,N-diisopropyl)-phosphoramidite CAS Number: 114616-27-2
[0490] 5′-Amino-Modifier TEG CE-Phosphoramidite
[0491] 10-(O-trifluoroacetamido-N-ethyl)-triethyleneglycol-1-[(2-cyanoethyl)-(N,N-diisopropyl)]-phosphoramidite
[0492] 3′ attachment:
[0493] 3′-Amino-Modifier Serinol CPG
[0494] 3-Dimethoxytrityloxy-2-(3-(fluorenylmethoxycarbonylamino)propanamido)propyl-1-O-succinyl-long chain alkylamino-CPG (where CPG stands for controlled-pore glass and is the solid support)
[0495] Amino-Modifier Serinol Phosphoramidite
[0496] 3-Dimethoxytrityloxy-2-(3-(fluorenylmethoxycarbonylamino)propanamido)propyl-1-O-(2-cyanoethyl)-(N,N-diisopropyl)-phosphoramidite

[0497] Internal (base modified):
[0498] Amino-Modifier C6 dT
[0499] 5′-Dimethoxytrityl-5-[N-(trifluoroacetylaminohexyl)-3-acrylimido]-2′-deoxyUridine,3′-[(2-cyanoethyl)-(N,N-diisopropyl)]-phosphoramidite. CAS Number: 178925-21-8

[0500] Solution phase conjugations may occur after oligonucleotide synthesis via reactions between non-nucleosidic nucleophilic functional groups that are attached to the oligonucleotide and electrophilic GalNAc reagents. Examples of nucleophilic groups include amines and thiols, and examples of electrophilic reagents include activated esters (e.g. N-hydroxysuccinimide, pentafluorophenyl) and maleimides.

### Example 25: GalNAc Ligands for Hepatocyte Targeting of Oligonucleotides

[0501] Without limiting the disclosure to these individual methods, there are at least two general methods for attachment of multivalent N-acetylgalactosamine (GalNAc) ligands to oligonucleotides: solid or solution-phase conjugations. GalNAc ligands may be attached to solid phase resin for 3′ conjugation or at the 5′ terminus using GalNAc phosphoramidite reagents. GalNAc phosphoramidites may be coupled on solid phase as for other nucleosides in the oligonucleotide sequence at any position in the sequence. A non-limiting example of a phosphoramidite reagent for GalNAc conjugation to a 5′ end oligonucleotide is shown in Table 77.

TABLE 77
GalNAc Conjugation Reagent

| Type of | |
|---|---|
| conjugation | Structure |
| Solid phase 5′ attachment phosphoramidite | [chemical structure] |

[0502] The following includes examples of synthesis reactions used to create a GalNAc moiety:

Scheme for the preparation of Nacegal-Linker-TMSOTf

[chemical structure]

### General Procedure for Preparation of Compound 2A

[chemical structure]

[0503] To a solution of Compound 1A (500 g, 4.76 mol, 476 mL) in 2-Methyl-THF (2.00 L) is added CbzCl (406 g, 2.38 mol, 338 mL) in 2-Methyl-THF (750 mL) dropwise at 0° C. The mixture is stirred at 25° C. for 2 hrs under N₂ atmosphere. TLC (DCM:MeOH=20:1, PMA) may indicate CbzCl is consumed completely and one new spot (R_{f}=0.43) formed. The reaction mixture is added HCl/EtOAc (1 N, 180 mL) and stirred for 30 mins, white solid is removed by filtration through celite, the filtrate is concentrated under vacuum to give Compound 2A (540 g, 2.26 mol, 47.5% yield) as a pale yellow oil and used into the next step without further purification. ¹H NMR: δ 7.28-7.41 (m, 5H), 5.55 (br s, 1H), 5.01-5.22 (m, 2H), 3.63-3.80 (m, 2H), 3.46-3.59 (m, 4H), 3.29-3.44 (m, 2H), 2.83-3.02 (m, 1H).

### General Procedure for Preparation of Compound 4A

[chemical structure]

[0504] To a solution of Compound 3A (1.00 kg, 4.64 mol, HCl) in pyridine (5.00 L) is added acetyl acetate (4.73 kg, 46.4 mol, 4.34 L) dropwise at 0° C. under N₂ atmosphere. The mixture is stirred at 25° C. for 16 hrs under N₂ atmosphere. TLC (DCM:MeOH=20:1, PMA) indicated Compound 3A is consumed completely and two new spots (R_{f}=0.35) formed. The reaction mixture is added to cold water (30.0 L) and stirred at 0° C. for 0.5 hr, white solid formed, filtered and dried to give Compound 4A (1.55 kg, 3.98 mol, 85.8% yield) as a white solid and used in the next step without further purification. ¹H NMR: δ 7.90 (d, J=9.29 Hz, 1H), 5.64 (d, J=8.78 Hz, 1H), 5.26 (d, J=3.01 Hz, 1H), 5.06 (dd, J=11.29, 3.26 Hz, 1H), 4.22 (t, J=6.15 Hz, 1H), 3.95-4.16 (m, 3H), 2.12 (s, 3H), 2.03 (s, 3H), 1.99 (s, 3H), 1.90 (s, 3H), 1.78 (s, 3H).

### General Procedure for Preparation of Compound 5A

[chemical structure]

[0505] To a solution of Compound 4A (300 g, 771 mmol) in DCE (1.50 L) is added TMSOTf (257 g, 1.16 mol, 209 mL) and stirred for 2 hrs at 60° C., and then stirred for 1 hr at 25° C. Compound 2A (203 g, 848 mmol) is dissolved in DCE (1.50 L) and added 4 powder molecular sieves (150 g) stirring for 30 mins under N₂ atmosphere. Then the solution of Compound 4A in DCE is added dropwise to the mixture at 0° C. The mixture is stirred at 25° C. for 16 hrs under N₂ atmosphere. TLC (DCM:MeOH=25:1, PMA) indicated Compound 4A is consumed completely and new spot (R_{f}=0.24) formed. The reaction mixture is filtered and washed with sat. NaHCO₃ (2.00 L), water (2.00 L) and sat. brine (2.00 L). The organic layer is dried over anhydrous Na₂SO₄, filtered and concentrated under reduced pressure to give a residue. The residue is triturated with 2-Me-THE/heptane (5/3, v/v, 1.80 L) for 2 hrs, filtered and dried to give Compound 5A (225 g, 389 mmol, 50.3% yield, 98.4% purity) as a white solid. ¹H NMR: δ 7.81 (d, J=9.29 Hz, 1H), 7.20-7.42 (m, 6H), 5.21 (d, J=3.26 Hz, 1H), 4.92-5.05 (m, 3H), 4.55 (d, J=8.28 Hz, 1H), 3.98-4.07 (m, 3H), 3.82-3.93 (m, 1H), 3.71-3.81 (m, 1H), 3.55-3.62 (m, 1H), 3.43-3.53 (m, 2H), 3.37-3.43 (m, 2H), 3.14 (q, J=5.77 Hz, 2H), 2.10 (s, 3H), 1.99 (s, 3H), 1.89 (s, 3H), 1.77 (s, 3H).

### General Procedure for Preparation of Nacegal-Linker-Tosylate Salt

[chemical structure]

[0506] To a solution of Compound 5A (200 g, 352 mmol) in THF (1.0 L) is added dry Pd/C (15.0 g, 10% purity) and TsOH (60.6 g, 352 mmol) under N₂ atmosphere. The suspension is degassed under vacuum and purged with H₂ several times. The mixture is stirred at 25° C. for 3 hrs under H₂ (45 psi) atmosphere. TLC (DCM:MeOH=10:1, PMA) indicated Compound 5A is consumed completely and one new spot (R_{f}=0.04) is formed. The reaction mixture is filtered and concentrated (≤40° C.) under reduced pressure to give a residue. Diluted with anhydrous DCM (500 mL, dried overnight with 4 Å molecular sieves (dried at 300° C. for 12 hrs)) and concentrate to give a residue and run Karl Fisher (KF) to check for water content. This is repeated 3 times with anhydrous DCM (500 mL) dilutions and concentration to give Nacegal-Linker-TMSOTf (205 g, 95.8% yield, TsOH salt) as a foamy white solid. ¹H NMR: δ 7.91 (d, J=9.03 Hz, 1H), 7.53-7.86 (m, 2H), 7.49 (d, J=8.03 Hz, 2H), 7.13 (d, J=8.03 Hz, 2H), 5.22 (d, J=3.26 Hz, 1H), 4.98 (dd, J=11.29, 3.26 Hz, 1H), 4.57 (d, J=8.53 Hz, 1H), 3.99-4.05 (m, 3H), 3.87-3.94 (m, 1H), 3.79-3.85 (m, 1H), 3.51-3.62 (m, 5H), 2.96 (br t, J=5.14 Hz, 2H), 2.29 (s, 3H), 2.10 (s, 3H), 2.00 (s, 3H), 1.89 (s, 3H), 1.78 (s, 3H).

### Scheme for the Preparation of TRIS-PEG2-CBZ

[chemical structure]

[chemical structure]

### General Procedure for Preparation of Compound 5B

[chemical structure]

[0507] To a solution of Compound 4B (400 g, 1.67 mol, 1.00 eq) and NaOH (10 M, 16.7 mL, 0.10 eq) in THF (2.00 L) is added Compound 4B_2 (1.07 kg, 8.36 mol, 1.20 L, 5.00 eq), the mixture is stirred at 30° C. for 2 hrs. LCMS showed the desired MS is given. Five batches of solution are combined to one batch, then the mixture is diluted with water (6.00 L), extracted with ethyl acetate (3.00 L*3), the combined organic layer is washed with brine (3.00 L), dried over Na₂SO₄, filtered and concentrated under vacuum. The crude is purified by column chromatography (SiO₂, petroleum ether:ethyl acetate=100:1-10:1, R_{f}=0.5) to give Compound 5B (2.36 kg, 6.43 mol, 76.9% yield) as light yellow oil. HNMR: δ 7.31-7.36 (m, 5H), 5.38 (s, 1H), 5.11-5.16 (m, 2H), 3.75 (t, J=6.4 Hz), 3.54-3.62 (m, 6H), 3.39 (d, J=5.2 Hz), 2.61 (t, J=6.0 Hz).

### General procedure for preparation of 3-oxo-1-phenyl-2,7,10-trioxa-4-azatridecan-13-oic acid (Compound 2B below)

[chemical structure]

[0508] To a solution of Compound 5B (741 g, 2.02 mol, 1.00 eq) in DCM (2.80 L) is added TFA (1.43 kg, 12.5 mol, 928 mL, 6.22 eq), the mixture is stirred at 25° C. for 3 hrs. LCMS showed the desired MS is given. The mixture is diluted with DCM (5.00 L), washed with water (3.00 L*3), brine (2.00 L), the combined organic layer is dried over Na₂SO₄, filtered and concentrated under vacuum to give Compound 2B (1800 g, crude) as light yellow oil. HNMR: δ 9.46 (s, 5H), 7.27-7.34 (m, 5H), 6.50-6.65 (m, 1H), 5.71 (s, 1H), 5.10-5.15 (m, 2H), 3.68-3.70 (m, 14H), 3.58-3.61 (m, 6H), 3.39 (s, 2H), 2.55 (s, 6H), 2.44 (s, 2H).

### General Procedure for Preparation of Compound 3B

[chemical structure]

[0509] To a solution of Compound 2B (375 g, 999 mmol, 83.0% purity, 1.00 eq) in DCM (1.80 L) is added HATU (570 g, 1.50 mol, 1.50 eq) and DIEA (258 g, 2.00 mol, 348 mL, 2.00 eq) at 0° C., the mixture is stirred at 0° C. for 30 min, then Compound 1B (606 g, 1.20 mol, 1.20 eq) is added, the mixture is stirred at 25° C. for 1 hr. LCMS showed desired MS is given. The mixture is combined to one batch, then the mixture is diluted with DCM (5.00 L), washed with 1 N HCl aqueous solution (2.00 L*2), then the organic layer is washed with saturated Na₂CO₃ aqueous solution (2.00 L*2) and brine (2.00 L), the organic layer is dried over Na₂SO₄, filtered and concentrated under vacuum to give Compound 3B (3.88 kg, crude) as yellow oil.

### General Procedure for Preparation of TRIS-PEG2-CBZ.

[chemical structure]

[0510] A solution of Compound 3B (775 g, 487 mmol, 50.3% purity, 1.00 eq) in HCl/dioxane (4 M, 2.91 L, 23.8 eq) is stirred at 25° C. for 2 hrs. LCMS showed the desired MS is given. The mixture is concentrated under vacuum to give a residue. Then the combined residue is diluted with DCM (5.00 L), adjusted to pH=8 with 2.5 M NaOH aqueous solution, and separated. The aqueous phase is extracted with DCM (3.00 L) again, then the aqueous solution is adjusted to pH=3 with 1 N HCl aqueous solution, then extracted with DCM (5.00 L*2), the combined organic layer is washed with brine (3.00 L), dried over Na₂SO₄, filtered and concentrated under vacuum. The crude is purified by column chromatography (SiO₂, DCM:MeOH=0:1-12:1, 0.1% HOAc, R_{f}=0.4). The residue is diluted with DCM (5.00 L), adjusted to pH=8 with 2.5 M NaOH aqueous solution, separated, the aqueous solution is extracted with DCM (3.00 L) again, then the aqueous solution is adjusted to pH=3 with 6 N HCl aqueous solution, extracted with DCM:MeOH=10:1 (5.00 L*2), the combined organic layer is washed with brine (2.00 L), dried over Na₂SO₄, filtered and concentrated under vacuum to give a residue. Then the residue is diluted with MeCN (5.00 L), concentrated under vacuum, repeat this procedure twice to remove water to give TRIS-PEG2-CBZ (1.25 kg, 1.91 mol, 78.1% yield, 95.8% purity) as light yellow oil. ¹HNMR: 400 MHz, MeOD, δ 7.30-7.35 (5H), 5.07 (s, 2H), 3.65-3.70 (m, 16H), 3.59 (s, 4H), 3.45 (t, J=5.6 Hz), 2.51 (t, J=6.0 Hz), 2.43 (t, 6.4 Hz).

Scheme for the preparation of TriNGal-TRIS-Peg2-Phosph 8c

[chemical structure]

[chemical structure]

[chemical structure]

[chemical structure]

### TriGNal-TRIS-Peg2-Phosph 8c

### General Procedure for Preparation of Compound 3C

[chemical structure]

[0511] To a solution of Compound 1C (155 g, 245 mmol, 1.00 eq) in can (1500 mL) is added TBTU (260 g, 811 mmol, 3.30 eq), DIEA (209 g, 1.62 mol, 282 mL, 6.60 eq) and Compound 2C (492 g, 811 mmol, 3.30 eq, TsOH) at 0° C., the mixture is stirred at 15° C. for 16 hrs. LCMS showed the desired MS is given. The mixture is concentrated under vacuum to give a residue, then the mixture is diluted with DCM (2000 mL), washed with 1 N HCl aqueous solution (700 mL*2), then saturated NaHCO₃ aqueous solution (700 mL*2) and concentrated under vacuum. The crude is purified by column chromatography to give Compound 3C (304 g, 155 mmol, 63.1% yield, 96.0% purity) as a yellow solid.

### General Procedure for Preparation of Compound 4C

[chemical structure]

[0512] Two batches solution of Compound 3C (55.0 g, 29.2 mmol, 1.00 eq) in MeOH (1600 mL) is added Pd/C (6.60 g, 19.1 mmol, 10.0% purity) and TFA (3.34 g, 29.2 mmol, 2.17 mL, 1.00 eq), the mixture is degassed under vacuum and purged with H₂. The mixture is stirred under H₂ (15 psi) at 15° C. for 2 hours. LCMS showed the desired MS is given. The mixture is filtered and the filtrate is concentrated under vacuum to give Compound 4C (106 g, 54.8 mmol, 93.7% yield, 96.2% purity, TFA) as a white solid.

### General Procedure for Preparation of Compound 5C

[chemical structure]

[0513] Two batches in parallel. To a solution of EDCI (28.8 g, 150 mmol, 1.00 eq) in DCM (125 mL) is added compound 4a (25.0 g, 150 mmol, 1.00 eq) dropwise at 0° C., then the mixture is added to compound 4 (25.0 g, 150 mmol, 1.00 eq) in DCM (125 mL) at 0° C., then the mixture is stirred at 25° C. for 1 hr. TLC (Petroleum ether:Ethyl acetate=3:1, R_{f}=0.45) showed the reactant is consumed and one new spot is formed. The reaction mixture is diluted with DCM (100 mL) then washed with aq.NaHCO₃ (250 mL*1) and brine (250 mL), dried over Na₂SO₄, filtered and concentrated under reduced pressure to give a residue. The residue is purified by column chromatography (SiO₂, Petroleum ether:Ethyl acetate=100:1 to 3:1), TLC (SiO₂, Petroleum ether:Ethyl acetate=3:1), R_{f}=0.45, then concentrated under reduced pressure to give a residue. Compound 5C (57.0 g, 176 mmol, 58.4% yield, 96.9% purity) is obtained as colorless oil and confirmed ¹HNMR: EW33072-2-P1A, 400 MHz, DMSO 6 9.21 (s, 1H), 7.07-7.09 (m, 2H), 6.67-6.70 (m, 2H), 3.02-3.04 (m, 2H), 2.86-2.90 (m, 2H)

### General Procedure for Preparation of Compound 6

[chemical structure]

[0514] To a mixture of compound 3 (79.0 g, 41.0 mmol, 96.4% purity, 1.00 eq, TFA) and compound 6C (14.2 g, 43.8 mmol, 96.9% purity, 1.07 eq) in DCM (800 mL) is added TEA (16.6 g, 164 mmol, 22.8 mL, 4.00 eq) dropwise at 0° C., the mixture is stirred at 15° C. for 16 hrs. LCMS (EW33072-12-P1B, Rt=0.844 min) showed the desired mass is detected. The reaction mixture is diluted with DCM (400 mL) and washed with aq.NaHCO₃ (400 mL*1) and brine (400 mL*1), then the mixture is diluted with DCM (2.00 L) and washed with 0.7 M Na₂CO₃ (1000 mL*3) and brine (800 mL*3), dried over Na₂SO₄, filtered and concentrated under reduced pressure to give a residue. The residue is used to next step directly without purification. Compound 6 (80.0 g, crude) is obtained as white solid and confirmed via ¹HNMR: EW33072-12-P1A, 400 MHz, MeOD 6 7-2-7.04 (m, 2H), 6.-8-6.70 (m, 2H), 5.-4-5.35 (s, 3H), 5.-7-5.08 (d, J=4.00 Hz, 3H), 4.-2-4.64 (d, J=8.00 Hz, 3H), 3.-1-4.16 (m, 16H), 3.-1-3.70 (m, 44H), 2.-0-2.83 (m, 2H), 2.68 (m, 2H), 2.-6-2.47 (m, 10H), 2.14 (s, 9H), 2.03 (s, 9H), 1.-4-1.95 (d, J=4.00 Hz, 18H).

### General Procedure for Preparation of TriGNal-TRIS-Peg2-Phosph 8c

[chemical structure]

[0515] Two batches are synthesized in parallel. To a solution of compound 6C (40.0 g, 21.1 mmol, 1.00 eq in DCM (600 mL) is added diisopropylammonium tetrazolide (3.62 g, 21.1 mmol, 1.00 eq) and compound 7c (6.37 g, 21.1 mmol, 6.71 mL, 1.00 eq) in DCM (8.00 mL) drop-wise, the mixture is stirred at 30° C. for 1 hr, then added compound 7c (3.18 g, 10.6 mmol, 3.35 mL, 0.50 eq) in DCM (8.00 mL) drop-wise, the mixture is stirred at 30° C. for 30 mins, then added compound 7c (3.18 g, 10.6 mmol, 3.35 mL, 0.50 eq) in DCM (8.00 mL) drop-wise, the mixture is stirred at 30° C. for 1.5 hrs. LCMS (EW33072-17-P1C1, Rt=0.921 min) showed the desired MS+1 is detected. LCMS (EW33072-17-P1C2, Rt=0.919 min) showed the desired MS+1 is detected. Two batches are combined for work-up. The mixture is diluted with DCM (1.20 L), washed with saturated NaHCO₃ aqueous solution (1.60 L*2), 3% DMF in H₂O (1.60 L*2), H₂O (1.60 L*3), brine (1.60 L), dried over Na₂SO₄, filtered and concentrated under reduced pressure to give a residue. The residue is purified by column chromatography (SiO₂, DCM:MeOH:TEA=100:3:2) TLC (SiO₂, DCM:MeOH=10:1, R_{f}=0.45), then concentrated under reduced pressure to give a residue. Compound 8C (76.0 g, 34.8 mmol, 82.5% yield, 96.0% purity) is obtained as white solid and confirmed via ¹HNMR: EW33072-19-PIC, 400 MHz, MeOD

[0516] δ 7.13-7.15 (d, J=8.50 Hz, 2H), 6.95-6.97 (dd, J=8.38, 1.13 Hz, 2H), 5.34 (d, J=2.88 Hz, 3H), 0.09 (dd, J=11.26, 3.38 Hz, 3H), 4.64 (d, J=8.50 Hz, 3H), 3.-9-4.20 (m, 12H), 3.-8-3.98 (m, 5H), 3.-6-3.83 (m, 20H), 3.-1-3.65 (m, 17H), 3.-3-3.50 (m, 9H), 2.87 (t, J=7.63 Hz, 2H), 2.76 (t, J=5.94 Hz, 2H), 2.-2-2.50 (m, 10H), 2.14 (s, 9H), 2.03 (s, 9H), 1-4-1.95 (d, J=6.13 Hz, 18H), 1.24-1.26 (d, J=6.75 Hz, 6H), 1.18-1.20 (d, J=6.75 Hz, 6H)

### Example 26: Modification Motif 1

[0517] An example FGG siRNA includes a combination of the following modifications:
[0518] Position 9 (from 5′ to 3′) of the sense strand is 2′F.
[0519] If position 9 is a pyrimidine then all purines in the Sense Strand are 2′OMe, and 1-5 pyrimidines between positions 5 and 11 are 2′F provided that there are never three 2′F modifications in a row.
[0520] If position 9 is a purine then all pyrimidines in the Sense Strand are 2′OMe, and 1-5 purines between positions 5 and 11 are 2′F provided that there are never three 2′F modifications in a row.
[0521] Antisense strand odd-numbered positions are 2′OMe and even-numbered positions are a mixture of 2′F, 2′OMe and 2′deoxy.

### Example 27: Modification Motif 2

[0522] An example FGG siRNA includes a combination of the following modifications:
[0523] Position 9 (from 5′ to 3′) of the sense strand is 2′deoxy.
[0524] Sense strand positions 5, 7 and 8 are 2′F.
[0525] All pyrimidines in positions 10-21 are 2′OMe, and purines are a mixture of 2′OMe and 2′F. Alternatively, all purines in positions 10-21 are 2′OMe and all pyrimidines in positions 10-21 are a mixture of 2′OMe and 2′F.
[0526] Antisense strand odd-numbered positions are 2′OMe and even-numbered positions are a mixture of 2′F, 2′OMe and 2′deoxy.

### IV. Sequence Information

[0527] Some embodiments include one or more nucleic acid sequences in the following tables:

TABLE 78
Sequence information

| SEQ | |
|---|---|
| ID NO: | Description |
| 1-1742 | FGG siRNA sense strand sequences |
| 1743-3484 | FGG siRNA antisense strand sequences |
| 3485-3537 | Modified FGG siRNA sense strand sequences |
| 3538-3590 | Modified FGG siRNA antisense strand sequences |
| 3591-3594 | Modified FGG siRNA sense strand sequences |
| 3595-3598 | Modified FGG siRNA antisense strand sequences |
| 3599-3620 | Modified FGG siRNA sense strand sequences |
| 3621 | Full-length human FGG mRNA sequence (Ensembl Acc. No. |
| | ENST00000404648) |
| 3622-3630 | Modification pattern 1S to 9S |
| 3631-3639 | Modification pattern 1AS to 9AS |
| 3640 | Modification pattern ASO1 |
| 3641-3676 | Modified FGG siRNA sense sequences |
| 3677-3712 | Modified FGG siRNA antisense sequences |
| 3713-3748 | FGG siRNA sense strand sequences |
| 3749-3784 | FGG siRNA antisense sequences |
| 3785-3804 | Modification pattern 10S to 29S |
| 3805-3816 | Modification pattern 10AS to 21AS |

TABLE 79
siRNA sequences

| | SEQ | | SEQ | |
|---|---|---|---|---|
| siRNA | ID | Sense strand sequence | ID | Antisense strand sequence |
| Name | NO: | (5'-3') | NO: | (5'-3') |
| siRNA 1 | 1 | AAAAAGGAGGAGCTTCAAC | 1743 | GTTGAAGCTCCTCCTTTTT |
| siRNA 2 | 2 | AAAAGGAGGAGCTTCAACC | 1744 | GGTTGAAGCTCCTCCTTTT |
| siRNA 3 | 3 | AAAGGAGGAGCTTCAACCT | 1745 | AGGTTGAAGCTCCTCCTTT |
| siRNA 4 | 4 | AAGGAGGAGCTTCAACCTG | 1746 | CAGGTTGAAGCTCCTCCTT |
| siRNA 5 | 5 | AGGAGGAGCTTCAACCTGT | 1747 | ACAGGTTGAAGCTCCTCCT |
| siRNA 6 | 6 | GGAGGAGCTTCAACCTGTG | 1748 | CACAGGTTGAAGCTCCTCC |
| siRNA 7 | 7 | GAGGAGCTTCAACCTGTGT | 1749 | ACACAGGTTGAAGCTCCTC |
| siRNA 8 | 8 | AGGAGCTTCAACCTGTGTG | 1750 | CACACAGGTTGAAGCTCCT |
| siRNA 9 | 9 | GGAGCTTCAACCTGTGTGC | 1751 | GCACACAGGTTGAAGCTCC |
| siRNA 10 | 10 | GAGCTTCAACCTGTGTGCA | 1752 | TGCACACAGGTTGAAGCTC |
| siRNA 11 | 11 | AGCTTCAACCTGTGTGCAA | 1753 | TTGCACACAGGTTGAAGCT |
| siRNA 12 | 12 | GCTTCAACCTGTGTGCAAA | 1754 | TTTGCACACAGGTTGAAGC |
| siRNA 13 | 13 | CTTCAACCTGTGTGCAAAA | 1755 | TTTTGCACACAGGTTGAAG |
| siRNA 14 | 14 | TTCAACCTGTGTGCAAAAT | 1756 | ATTTTGCACACAGGTTGAA |
| siRNA 15 | 15 | TCAACCTGTGTGCAAAATC | 1757 | GATTTTGCACACAGGTTGA |
| siRNA 16 | 16 | CAACCTGTGTGCAAAATCT | 1758 | AGATTTTGCACACAGGTTG |
| siRNA 17 | 17 | AACCTGTGTGCAAAATCTG | 1759 | CAGATTTTGCACACAGGTT |
| siRNA 18 | 18 | ACCTGTGTGCAAAATCTGG | 1760 | CCAGATTTTGCACACAGGT |
| siRNA 19 | 19 | CCTGTGTGCAAAATCTGGG | 1761 | CCCAGATTTTGCACACAGG |
| siRNA 20 | 20 | CTGTGTGCAAAATCTGGGA | 1762 | TCCCAGATTTTGCACACAG |
| siRNA 21 | 21 | TGTGTGCAAAATCTGGGAA | 1763 | TTCCCAGATTTTGCACACA |
| siRNA 22 | 22 | GTGTGCAAAATCTGGGAAC | 1764 | GTTCCCAGATTTTGCACAC |
| siRNA 23 | 23 | TGTGCAAAATCTGGGAACC | 1765 | GGTTCCCAGATTTTGCACA |
| siRNA 24 | 24 | GTGCAAAATCTGGGAACCT | 1766 | AGGTTCCCAGATTTTGCAC |
| siRNA 25 | 25 | TGCAAAATCTGGGAACCTG | 1767 | CAGGTTCCCAGATTTTGCA |
| siRNA 26 | 26 | GCAAAATCTGGGAACCTGA | 1768 | TCAGGTTCCCAGATTTTGC |
| siRNA 27 | 27 | CAAAATCTGGGAACCTGAC | 1769 | GTCAGGTTCCCAGATTTTG |
| siRNA 28 | 28 | AAAATCTGGGAACCTGACA | 1770 | TGTCAGGTTCCCAGATTTT |
| siRNA 29 | 29 | AAATCTGGGAACCTGACAG | 1771 | CTGTCAGGTTCCCAGATTT |
| siRNA 30 | 30 | AATCTGGGAACCTGACAGT | 1772 | ACTGTCAGGTTCCCAGATT |
| siRNA 31 | 31 | ATCTGGGAACCTGACAGTA | 1773 | TACTGTCAGGTTCCCAGAT |
| siRNA 32 | 32 | TCTGGGAACCTGACAGTAT | 1774 | ATACTGTCAGGTTCCCAGA |
| siRNA 33 | 33 | CTGGGAACCTGACAGTATA | 1775 | TATACTGTCAGGTTCCCAG |
| siRNA 34 | 34 | TGGGAACCTGACAGTATAG | 1776 | CTATACTGTCAGGTTCCCA |
| siRNA 35 | 35 | GGGAACCTGACAGTATAGG | 1777 | CCTATACTGTCAGGTTCCC |
| siRNA 36 | 36 | GGAACCTGACAGTATAGGT | 1778 | ACCTATACTGTCAGGTTCC |
| siRNA 37 | 37 | GAACCTGACAGTATAGGTT | 1779 | AACCTATACTGTCAGGTTC |
| siRNA 38 | 38 | AACCTGACAGTATAGGTTG | 1780 | CAACCTATACTGTCAGGTT |
| siRNA 39 | 39 | ACCTGACAGTATAGGTTGG | 1781 | CCAACCTATACTGTCAGGT |
| siRNA 40 | 40 | CCTGACAGTATAGGTTGGG | 1782 | CCCAACCTATACTGTCAGG |
| siRNA 41 | 41 | CTGACAGTATAGGTTGGGG | 1783 | CCCCAACCTATACTGTCAG |
| siRNA 42 | 42 | TGACAGTATAGGTTGGGGG | 1784 | CCCCCAACCTATACTGTCA |
| siRNA 43 | 43 | GACAGTATAGGTTGGGGGC | 1785 | GCCCCCAACCTATACTGTC |
| siRNA 44 | 44 | ACAGTATAGGTTGGGGGCC | 1786 | GGCCCCCAACCTATACTGT |
| siRNA 45 | 45 | CAGTATAGGTTGGGGGCCA | 1787 | TGGCCCCCAACCTATACTG |
| siRNA 46 | 46 | AGTATAGGTTGGGGGCCAG | 1788 | CTGGCCCCCAACCTATACT |
| siRNA 47 | 47 | GTATAGGTTGGGGGCCAGG | 1789 | CCTGGCCCCCAACCTATAC |
| siRNA 48 | 48 | TATAGGTTGGGGGCCAGGA | 1790 | TCCTGGCCCCCAACCTATA |
| siRNA 49 | 49 | ATAGGTTGGGGGCCAGGAT | 1791 | ATCCTGGCCCCCAACCTAT |
| siRNA 50 | 50 | TAGGTTGGGGGCCAGGATG | 1792 | CATCCTGGCCCCCAACCTA |
| siRNA 51 | 51 | AGGTTGGGGGCCAGGATGA | 1793 | TCATCCTGGCCCCCAACCT |
| siRNA 52 | 52 | GGTTGGGGGCCAGGATGAG | 1794 | CTCATCCTGGCCCCCAACC |
| siRNA 53 | 53 | GTTGGGGGCCAGGATGAGG | 1795 | CCTCATCCTGGCCCCCAAC |
| siRNA 54 | 54 | TTGGGGGCCAGGATGAGGA | 1796 | TCCTCATCCTGGCCCCCAA |
| siRNA 55 | 55 | TGGGGGCCAGGATGAGGAA | 1797 | TTCCTCATCCTGGCCCCCA |
| siRNA 56 | 56 | GGGGGCCAGGATGAGGAAA | 1798 | TTTCCTCATCCTGGCCCCC |
| siRNA 57 | 57 | GGGGCCAGGATGAGGAAAA | 1799 | TTTTCCTCATCCTGGCCCC |
| siRNA 58 | 58 | GGGCCAGGATGAGGAAAAA | 1800 | TTTTTCCTCATCCTGGCCC |
| siRNA 59 | 59 | GGCCAGGATGAGGAAAAAG | 1801 | CTTTTTCCTCATCCTGGCC |
| siRNA 60 | 60 | GCCAGGATGAGGAAAAAGG | 1802 | CCTTTTTCCTCATCCTGGC |
| siRNA 61 | 61 | CCAGGATGAGGAAAAAGGA | 1803 | TCCTTTTTCCTCATCCTGG |
| siRNA 62 | 62 | CAGGATGAGGAAAAAGGAA | 1804 | TTCCTTTTTCCTCATCCTG |
| siRNA 63 | 63 | AGGATGAGGAAAAAGGAAC | 1805 | GTTCCTTTTTCCTCATCCT |
| siRNA 64 | 64 | GGATGAGGAAAAAGGAACG | 1806 | CGTTCCTTTTTCCTCATCC |
| siRNA 65 | 65 | GATGAGGAAAAAGGAACGG | 1807 | CCGTTCCTTTTTCCTCATC |
| siRNA 66 | 66 | ATGAGGAAAAAGGAACGGG | 1808 | CCCGTTCCTTTTTCCTCAT |
| siRNA 67 | 67 | TGAGGAAAAAGGAACGGGA | 1809 | TCCCGTTCCTTTTTCCTCA |
| siRNA 68 | 68 | GAGGAAAAAGGAACGGGAA | 1810 | TTCCCGTTCCTTTTTCCTC |
| siRNA 69 | 69 | AGGAAAAAGGAACGGGAAA | 1811 | TTTCCCGTTCCTTTTTCCT |
| siRNA 70 | 70 | GGAAAAAGGAACGGGAAAG | 1812 | CTTTCCCGTTCCTTTTTCC |
| siRNA 71 | 71 | GAAAAAGGAACGGGAAAGA | 1813 | TCTTTCCCGTTCCTTTTTC |
| siRNA 72 | 72 | AAAAAGGAACGGGAAAGAC | 1814 | GTCTTTCCCGTTCCTTTTT |
| siRNA 73 | 73 | AAAAGGAACGGGAAAGACC | 1815 | GGTCTTTCCCGTTCCTTTT |
| siRNA 74 | 74 | AAAGGAACGGGAAAGACCT | 1816 | AGGTCTTTCCCGTTCCTTT |
| siRNA 75 | 75 | AAGGAACGGGAAAGACCTG | 1817 | CAGGTCTTTCCCGTTCCTT |
| siRNA 76 | 76 | AGGAACGGGAAAGACCTGC | 1818 | GCAGGTCTTTCCCGTTCCT |
| siRNA 77 | 77 | GGAACGGGAAAGACCTGCC | 1819 | GGCAGGTCTTTCCCGTTCC |
| siRNA 78 | 78 | GAACGGGAAAGACCTGCCC | 1820 | GGGCAGGTCTTTCCCGTTC |
| siRNA 79 | 79 | AACGGGAAAGACCTGCCCA | 1821 | TGGGCAGGTCTTTCCCGTT |
| siRNA 80 | 80 | ACGGGAAAGACCTGCCCAC | 1822 | GTGGGCAGGTCTTTCCCGT |
| siRNA 81 | 81 | CGGGAAAGACCTGCCCACC | 1823 | GGTGGGCAGGTCTTTCCCG |
| siRNA 82 | 82 | GGGAAAGACCTGCCCACCC | 1824 | GGGTGGGCAGGTCTTTCCC |
| siRNA 83 | 83 | GGAAAGACCTGCCCACCCT | 1825 | AGGGTGGGCAGGTCTTTCC |
| siRNA 84 | 84 | GAAAGACCTGCCCACCCTT | 1826 | AAGGGTGGGCAGGTCTTTC |
| siRNA 85 | 85 | AAAGACCTGCCCACCCTTC | 1827 | GAAGGGTGGGCAGGTCTTT |
| siRNA 86 | 86 | AAGACCTGCCCACCCTTCT | 1828 | AGAAGGGTGGGCAGGTCTT |
| siRNA 87 | 87 | AGACCTGCCCACCCTTCTG | 1829 | CAGAAGGGTGGGCAGGTCT |
| siRNA 88 | 88 | GACCTGCCCACCCTTCTGG | 1830 | CCAGAAGGGTGGGCAGGTC |
| siRNA 89 | 89 | ACCTGCCCACCCTTCTGGT | 1831 | ACCAGAAGGGTGGGCAGGT |
| siRNA 90 | 90 | CCTGCCCACCCTTCTGGTA | 1832 | TACCAGAAGGGTGGGCAGG |
| siRNA 91 | 91 | CTGCCCACCCTTCTGGTAA | 1833 | TTACCAGAAGGGTGGGCAG |
| siRNA 92 | 92 | TGCCCACCCTTCTGGTAAG | 1834 | CTTACCAGAAGGGTGGGCA |
| siRNA 93 | 93 | GCCCACCCTTCTGGTAAGG | 1835 | CCTTACCAGAAGGGTGGGC |
| siRNA 94 | 94 | CCCACCCTTCTGGTAAGGA | 1836 | TCCTTACCAGAAGGGTGGG |
| siRNA 95 | 95 | CCACCCTTCTGGTAAGGAG | 1837 | CTCCTTACCAGAAGGGTGG |
| siRNA 96 | 96 | CACCCTTCTGGTAAGGAGG | 1838 | CCTCCTTACCAGAAGGGTG |
| siRNA 97 | 97 | ACCCTTCTGGTAAGGAGGC | 1839 | GCCTCCTTACCAGAAGGGT |
| siRNA 98 | 98 | CCCTTCTGGTAAGGAGGCC | 1840 | GGCCTCCTTACCAGAAGGG |
| siRNA 99 | 99 | CCTTCTGGTAAGGAGGCCC | 1841 | GGGCCTCCTTACCAGAAGG |
| siRNA 100 | 100 | CTTCTGGTAAGGAGGCCCC | 1842 | GGGGCCTCCTTACCAGAAG |
| siRNA 101 | 101 | TTCTGGTAAGGAGGCCCCG | 1843 | CGGGGCCTCCTTACCAGAA |
| siRNA 102 | 102 | TCTGGTAAGGAGGCCCCGT | 1844 | ACGGGGCCTCCTTACCAGA |
| siRNA 103 | 103 | CTGGTAAGGAGGCCCCGTG | 1845 | CACGGGGCCTCCTTACCAG |
| siRNA 104 | 104 | TGGTAAGGAGGCCCCGTGA | 1846 | TCACGGGGCCTCCTTACCA |
| siRNA 105 | 105 | GGTAAGGAGGCCCCGTGAT | 1847 | ATCACGGGGCCTCCTTACC |
| siRNA 106 | 106 | GTAAGGAGGCCCCGTGATC | 1848 | GATCACGGGGCCTCCTTAC |
| siRNA 107 | 107 | TAAGGAGGCCCCGTGATCA | 1849 | TGATCACGGGGCCTCCTTA |
| siRNA 108 | 108 | AAGGAGGCCCCGTGATCAG | 1850 | CTGATCACGGGGCCTCCTT |
| siRNA 109 | 109 | AGGAGGCCCCGTGATCAGC | 1851 | GCTGATCACGGGGCCTCCT |
| siRNA 110 | 110 | GGAGGCCCCGTGATCAGCT | 1852 | AGCTGATCACGGGGCCTCC |
| siRNA 111 | 111 | GAGGCCCCGTGATCAGCTC | 1853 | GAGCTGATCACGGGGCCTC |
| siRNA 112 | 112 | AGGCCCCGTGATCAGCTCC | 1854 | GGAGCTGATCACGGGGCCT |
| siRNA 113 | 113 | GGCCCCGTGATCAGCTCCA | 1855 | TGGAGCTGATCACGGGGCC |
| siRNA 114 | 114 | GCCCCGTGATCAGCTCCAG | 1856 | CTGGAGCTGATCACGGGGC |
| siRNA 115 | 115 | CCCCGTGATCAGCTCCAGC | 1857 | GCTGGAGCTGATCACGGGG |
| siRNA 116 | 116 | CCCGTGATCAGCTCCAGCC | 1858 | GGCTGGAGCTGATCACGGG |
| siRNA 117 | 117 | CCGTGATCAGCTCCAGCCA | 1859 | TGGCTGGAGCTGATCACGG |
| siRNA 118 | 118 | CGTGATCAGCTCCAGCCAT | 1860 | ATGGCTGGAGCTGATCACG |
| siRNA 119 | 119 | GTGATCAGCTCCAGCCATT | 1861 | AATGGCTGGAGCTGATCAC |
| siRNA 120 | 120 | TGATCAGCTCCAGCCATTT | 1862 | AAATGGCTGGAGCTGATCA |
| siRNA 121 | 121 | GATCAGCTCCAGCCATTTG | 1863 | CAAATGGCTGGAGCTGATC |
| siRNA 122 | 122 | ATCAGCTCCAGCCATTTGC | 1864 | GCAAATGGCTGGAGCTGAT |
| siRNA 123 | 123 | TCAGCTCCAGCCATTTGCA | 1865 | TGCAAATGGCTGGAGCTGA |
| siRNA 124 | 124 | CAGCTCCAGCCATTTGCAG | 1866 | CTGCAAATGGCTGGAGCTG |
| siRNA 125 | 125 | AGCTCCAGCCATTTGCAGT | 1867 | ACTGCAAATGGCTGGAGCT |
| siRNA 126 | 126 | GCTCCAGCCATTTGCAGTC | 1868 | GACTGCAAATGGCTGGAGC |
| siRNA 127 | 127 | CTCCAGCCATTTGCAGTCC | 1869 | GGACTGCAAATGGCTGGAG |
| siRNA 128 | 128 | TCCAGCCATTTGCAGTCCT | 1870 | AGGACTGCAAATGGCTGGA |
| siRNA 129 | 129 | CCAGCCATTTGCAGTCCTG | 1871 | CAGGACTGCAAATGGCTGG |
| siRNA 130 | 130 | CAGCCATTTGCAGTCCTGG | 1872 | CCAGGACTGCAAATGGCTG |
| siRNA 131 | 131 | AGCCATTTGCAGTCCTGGC | 1873 | GCCAGGACTGCAAATGGCT |
| siRNA 132 | 132 | GCCATTTGCAGTCCTGGCT | 1874 | AGCCAGGACTGCAAATGGC |
| siRNA 133 | 133 | CCATTTGCAGTCCTGGCTA | 1875 | TAGCCAGGACTGCAAATGG |
| siRNA 134 | 134 | CATTTGCAGTCCTGGCTAT | 1876 | ATAGCCAGGACTGCAAATG |
| siRNA 135 | 135 | ATTTGCAGTCCTGGCTATC | 1877 | GATAGCCAGGACTGCAAAT |
| siRNA 136 | 136 | TTTGCAGTCCTGGCTATCC | 1878 | GGATAGCCAGGACTGCAAA |
| siRNA 137 | 137 | TTGCAGTCCTGGCTATCCC | 1879 | GGGATAGCCAGGACTGCAA |
| siRNA 138 | 138 | TGCAGTCCTGGCTATCCCA | 1880 | TGGGATAGCCAGGACTGCA |
| siRNA 139 | 139 | GCAGTCCTGGCTATCCCAG | 1881 | CTGGGATAGCCAGGACTGC |
| siRNA 140 | 140 | CAGTCCTGGCTATCCCAGG | 1882 | CCTGGGATAGCCAGGACTG |
| siRNA 141 | 141 | AGTCCTGGCTATCCCAGGA | 1883 | TCCTGGGATAGCCAGGACT |
| siRNA 142 | 142 | GTCCTGGCTATCCCAGGAG | 1884 | CTCCTGGGATAGCCAGGAC |
| siRNA 143 | 143 | TCCTGGCTATCCCAGGAGC | 1885 | GCTCCTGGGATAGCCAGGA |
| siRNA 144 | 144 | CCTGGCTATCCCAGGAGCT | 1886 | AGCTCCTGGGATAGCCAGG |
| siRNA 145 | 145 | CTGGCTATCCCAGGAGCTT | 1887 | AAGCTCCTGGGATAGCCAG |
| siRNA 146 | 146 | TGGCTATCCCAGGAGCTTA | 1888 | TAAGCTCCTGGGATAGCCA |
| siRNA 147 | 147 | GGCTATCCCAGGAGCTTAC | 1889 | GTAAGCTCCTGGGATAGCC |
| siRNA 148 | 148 | GCTATCCCAGGAGCTTACA | 1890 | TGTAAGCTCCTGGGATAGC |
| siRNA 149 | 149 | CTATCCCAGGAGCTTACAT | 1891 | ATGTAAGCTCCTGGGATAG |
| siRNA 150 | 150 | TATCCCAGGAGCTTACATA | 1892 | TATGTAAGCTCCTGGGATA |
| siRNA 151 | 151 | ATCCCAGGAGCTTACATAA | 1893 | TTATGTAAGCTCCTGGGAT |
| siRNA 152 | 152 | TCCCAGGAGCTTACATAAA | 1894 | TTTATGTAAGCTCCTGGGA |
| siRNA 153 | 153 | CCCAGGAGCTTACATAAAG | 1895 | CTTTATGTAAGCTCCTGGG |
| siRNA 154 | 154 | CCAGGAGCTTACATAAAGG | 1896 | CCTTTATGTAAGCTCCTGG |
| siRNA 155 | 155 | CAGGAGCTTACATAAAGGG | 1897 | CCCTTTATGTAAGCTCCTG |
| siRNA 156 | 156 | AGGAGCTTACATAAAGGGA | 1898 | TCCCTTTATGTAAGCTCCT |
| siRNA 157 | 157 | GGAGCTTACATAAAGGGAC | 1899 | GTCCCTTTATGTAAGCTCC |
| siRNA 158 | 158 | GAGCTTACATAAAGGGACA | 1900 | TGTCCCTTTATGTAAGCTC |
| siRNA 159 | 159 | AGCTTACATAAAGGGACAA | 1901 | TTGTCCCTTTATGTAAGCT |
| siRNA 160 | 160 | GCTTACATAAAGGGACAAT | 1902 | ATTGTCCCTTTATGTAAGC |
| siRNA 161 | 161 | CTTACATAAAGGGACAATT | 1903 | AATTGTCCCTTTATGTAAG |
| siRNA 162 | 162 | TTACATAAAGGGACAATTG | 1904 | CAATTGTCCCTTTATGTAA |
| siRNA 163 | 163 | TACATAAAGGGACAATTGG | 1905 | CCAATTGTCCCTTTATGTA |
| siRNA 164 | 164 | ACATAAAGGGACAATTGGA | 1906 | TCCAATTGTCCCTTTATGT |
| siRNA 165 | 165 | CATAAAGGGACAATTGGAG | 1907 | CTCCAATTGTCCCTTTATG |
| siRNA 166 | 166 | ATAAAGGGACAATTGGAGC | 1908 | GCTCCAATTGTCCCTTTAT |
| siRNA 167 | 167 | TAAAGGGACAATTGGAGCC | 1909 | GGCTCCAATTGTCCCTTTA |
| siRNA 168 | 168 | AAAGGGACAATTGGAGCCT | 1910 | AGGCTCCAATTGTCCCTTT |
| siRNA 169 | 169 | AAGGGACAATTGGAGCCTG | 1911 | CAGGCTCCAATTGTCCCTT |
| siRNA 170 | 170 | AGGGACAATTGGAGCCTGA | 1912 | TCAGGCTCCAATTGTCCCT |
| siRNA 171 | 171 | GGGACAATTGGAGCCTGAG | 1913 | CTCAGGCTCCAATTGTCCC |
| siRNA 172 | 172 | GGACAATTGGAGCCTGAGA | 1914 | TCTCAGGCTCCAATTGTCC |
| siRNA 173 | 173 | GACAATTGGAGCCTGAGAG | 1915 | CTCTCAGGCTCCAATTGTC |
| siRNA 174 | 174 | ACAATTGGAGCCTGAGAGG | 1916 | CCTCTCAGGCTCCAATTGT |
| siRNA 175 | 175 | CAATTGGAGCCTGAGAGGT | 1917 | ACCTCTCAGGCTCCAATTG |
| siRNA 176 | 176 | AATTGGAGCCTGAGAGGTG | 1918 | CACCTCTCAGGCTCCAATT |
| siRNA 177 | 177 | ATTGGAGCCTGAGAGGTGA | 1919 | TCACCTCTCAGGCTCCAAT |
| siRNA 178 | 178 | TTGGAGCCTGAGAGGTGAC | 1920 | GTCACCTCTCAGGCTCCAA |
| siRNA 179 | 179 | TGGAGCCTGAGAGGTGACA | 1921 | TGTCACCTCTCAGGCTCCA |
| siRNA 180 | 180 | GGAGCCTGAGAGGTGACAG | 1922 | CTGTCACCTCTCAGGCTCC |
| siRNA 181 | 181 | GAGCCTGAGAGGTGACAGT | 1923 | ACTGTCACCTCTCAGGCTC |
| siRNA 182 | 182 | AGCCTGAGAGGTGACAGTG | 1924 | CACTGTCACCTCTCAGGCT |
| siRNA 183 | 183 | GCCTGAGAGGTGACAGTGC | 1925 | GCACTGTCACCTCTCAGGC |
| siRNA 184 | 184 | CCTGAGAGGTGACAGTGCT | 1926 | AGCACTGTCACCTCTCAGG |
| siRNA 185 | 185 | CTGAGAGGTGACAGTGCTG | 1927 | CAGCACTGTCACCTCTCAG |
| siRNA 186 | 186 | TGAGAGGTGACAGTGCTGA | 1928 | TCAGCACTGTCACCTCTCA |
| siRNA 187 | 187 | GAGAGGTGACAGTGCTGAC | 1929 | GTCAGCACTGTCACCTCTC |
| siRNA 188 | 188 | AGAGGTGACAGTGCTGACA | 1930 | TGTCAGCACTGTCACCTCT |
| siRNA 189 | 189 | GAGGTGACAGTGCTGACAC | 1931 | GTGTCAGCACTGTCACCTC |
| siRNA 190 | 190 | AGGTGACAGTGCTGACACT | 1932 | AGTGTCAGCACTGTCACCT |
| siRNA 191 | 191 | GGTGACAGTGCTGACACTA | 1933 | TAGTGTCAGCACTGTCACC |
| siRNA 192 | 192 | GTGACAGTGCTGACACTAC | 1934 | GTAGTGTCAGCACTGTCAC |
| siRNA 193 | 193 | TGACAGTGCTGACACTACA | 1935 | TGTAGTGTCAGCACTGTCA |
| siRNA 194 | 194 | GACAGTGCTGACACTACAA | 1936 | TTGTAGTGTCAGCACTGTC |
| siRNA 195 | 195 | ACAGTGCTGACACTACAAG | 1937 | CTTGTAGTGTCAGCACTGT |
| siRNA 196 | 196 | CAGTGCTGACACTACAAGG | 1938 | CCTTGTAGTGTCAGCACTG |
| siRNA 197 | 197 | AGTGCTGACACTACAAGGC | 1939 | GCCTTGTAGTGTCAGCACT |
| siRNA 198 | 198 | GTGCTGACACTACAAGGCT | 1940 | AGCCTTGTAGTGTCAGCAC |
| siRNA 199 | 199 | TGCTGACACTACAAGGCTC | 1941 | GAGCCTTGTAGTGTCAGCA |
| siRNA 200 | 200 | GCTGACACTACAAGGCTCG | 1942 | CGAGCCTTGTAGTGTCAGC |
| siRNA 201 | 201 | CTGACACTACAAGGCTCGG | 1943 | CCGAGCCTTGTAGTGTCAG |
| siRNA 202 | 202 | TGACACTACAAGGCTCGGA | 1944 | TCCGAGCCTTGTAGTGTCA |
| siRNA 203 | 203 | GACACTACAAGGCTCGGAG | 1945 | CTCCGAGCCTTGTAGTGTC |
| siRNA 204 | 204 | ACACTACAAGGCTCGGAGC | 1946 | GCTCCGAGCCTTGTAGTGT |
| siRNA 205 | 205 | CACTACAAGGCTCGGAGCT | 1947 | AGCTCCGAGCCTTGTAGTG |
| siRNA 206 | 206 | ACTACAAGGCTCGGAGCTC | 1948 | GAGCTCCGAGCCTTGTAGT |
| siRNA 207 | 207 | CTACAAGGCTCGGAGCTCC | 1949 | GGAGCTCCGAGCCTTGTAG |
| siRNA 208 | 208 | TACAAGGCTCGGAGCTCCG | 1950 | CGGAGCTCCGAGCCTTGTA |
| siRNA 209 | 209 | ACAAGGCTCGGAGCTCCGG | 1951 | CCGGAGCTCCGAGCCTTGT |
| siRNA 210 | 210 | CAAGGCTCGGAGCTCCGGG | 1952 | CCCGGAGCTCCGAGCCTTG |
| siRNA 211 | 211 | AAGGCTCGGAGCTCCGGGC | 1953 | GCCCGGAGCTCCGAGCCTT |
| siRNA 212 | 212 | AGGCTCGGAGCTCCGGGCA | 1954 | TGCCCGGAGCTCCGAGCCT |
| siRNA 213 | 213 | GGCTCGGAGCTCCGGGCAC | 1955 | GTGCCCGGAGCTCCGAGCC |
| siRNA 214 | 214 | GCTCGGAGCTCCGGGCACT | 1956 | AGTGCCCGGAGCTCCGAGC |
| siRNA 215 | 215 | CTCGGAGCTCCGGGCACTC | 1957 | GAGTGCCCGGAGCTCCGAG |
| siRNA 216 | 216 | TCGGAGCTCCGGGCACTCA | 1958 | TGAGTGCCCGGAGCTCCGA |
| siRNA 217 | 217 | CGGAGCTCCGGGCACTCAG | 1959 | CTGAGTGCCCGGAGCTCCG |
| siRNA 218 | 218 | GGAGCTCCGGGCACTCAGA | 1960 | TCTGAGTGCCCGGAGCTCC |
| siRNA 219 | 219 | GAGCTCCGGGCACTCAGAC | 1961 | GTCTGAGTGCCCGGAGCTC |
| siRNA 220 | 220 | AGCTCCGGGCACTCAGACA | 1962 | TGTCTGAGTGCCCGGAGCT |
| siRNA 221 | 221 | GCTCCGGGCACTCAGACAT | 1963 | ATGTCTGAGTGCCCGGAGC |
| siRNA 222 | 222 | CTCCGGGCACTCAGACATC | 1964 | GATGTCTGAGTGCCCGGAG |
| siRNA 223 | 223 | TCCGGGCACTCAGACATCA | 1965 | TGATGTCTGAGTGCCCGGA |
| siRNA 224 | 224 | CCGGGCACTCAGACATCAT | 1966 | ATGATGTCTGAGTGCCCGG |
| siRNA 225 | 225 | CGGGCACTCAGACATCATG | 1967 | CATGATGTCTGAGTGCCCG |
| siRNA 226 | 226 | GGGCACTCAGACATCATGA | 1968 | TCATGATGTCTGAGTGCCC |
| siRNA 227 | 227 | GGCACTCAGACATCATGAG | 1969 | CTCATGATGTCTGAGTGCC |
| siRNA 228 | 228 | GCACTCAGACATCATGAGT | 1970 | ACTCATGATGTCTGAGTGC |
| siRNA 229 | 229 | CACTCAGACATCATGAGTT | 1971 | AACTCATGATGTCTGAGTG |
| siRNA 230 | 230 | ACTCAGACATCATGAGTTG | 1972 | CAACTCATGATGTCTGAGT |
| siRNA 231 | 231 | CTCAGACATCATGAGTTGG | 1973 | CCAACTCATGATGTCTGAG |
| siRNA 232 | 232 | TCAGACATCATGAGTTGGT | 1974 | ACCAACTCATGATGTCTGA |
| siRNA 233 | 233 | CAGACATCATGAGTTGGTC | 1975 | GACCAACTCATGATGTCTG |
| siRNA 234 | 234 | AGACATCATGAGTTGGTCC | 1976 | GGACCAACTCATGATGTCT |
| siRNA 235 | 235 | GACATCATGAGTTGGTCCT | 1977 | AGGACCAACTCATGATGTC |
| siRNA 236 | 236 | ACATCATGAGTTGGTCCTT | 1978 | AAGGACCAACTCATGATGT |
| siRNA 237 | 237 | CATCATGAGTTGGTCCTTG | 1979 | CAAGGACCAACTCATGATG |
| siRNA 238 | 238 | ATCATGAGTTGGTCCTTGC | 1980 | GCAAGGACCAACTCATGAT |
| siRNA 239 | 239 | TCATGAGTTGGTCCTTGCA | 1981 | TGCAAGGACCAACTCATGA |
| siRNA 240 | 240 | CATGAGTTGGTCCTTGCAC | 1982 | GTGCAAGGACCAACTCATG |
| siRNA 241 | 241 | ATGAGTTGGTCCTTGCACC | 1983 | GGTGCAAGGACCAACTCAT |
| siRNA 242 | 242 | TGAGTTGGTCCTTGCACCC | 1984 | GGGTGCAAGGACCAACTCA |
| siRNA 243 | 243 | GAGTTGGTCCTTGCACCCC | 1985 | GGGGTGCAAGGACCAACTC |
| siRNA 244 | 244 | AGTTGGTCCTTGCACCCCC | 1986 | GGGGGTGCAAGGACCAACT |
| siRNA 245 | 245 | GTTGGTCCTTGCACCCCCG | 1987 | CGGGGGTGCAAGGACCAAC |
| siRNA 246 | 246 | TTGGTCCTTGCACCCCCGG | 1988 | CCGGGGGTGCAAGGACCAA |
| siRNA 247 | 247 | TGGTCCTTGCACCCCCGGA | 1989 | TCCGGGGGTGCAAGGACCA |
| siRNA 248 | 248 | GGTCCTTGCACCCCCGGAA | 1990 | TTCCGGGGGTGCAAGGACC |
| siRNA 249 | 249 | GTCCTTGCACCCCCGGAAT | 1991 | ATTCCGGGGGTGCAAGGAC |
| siRNA 250 | 250 | TCCTTGCACCCCCGGAATT | 1992 | AATTCCGGGGGTGCAAGGA |
| siRNA 251 | 251 | CCTTGCACCCCCGGAATTT | 1993 | AAATTCCGGGGGTGCAAGG |
| siRNA 252 | 252 | CTTGCACCCCCGGAATTTA | 1994 | TAAATTCCGGGGGTGCAAG |
| siRNA 253 | 253 | TTGCACCCCCGGAATTTAA | 1995 | TTAAATTCCGGGGGTGCAA |
| siRNA 254 | 254 | TGCACCCCCGGAATTTAAT | 1996 | ATTAAATTCCGGGGGTGCA |
| siRNA 255 | 255 | GCACCCCCGGAATTTAATT | 1997 | AATTAAATTCCGGGGGTGC |
| siRNA 256 | 256 | CACCCCCGGAATTTAATTC | 1998 | GAATTAAATTCCGGGGGTG |
| siRNA 257 | 257 | ACCCCCGGAATTTAATTCT | 1999 | AGAATTAAATTCCGGGGGT |
| siRNA 258 | 258 | CCCCCGGAATTTAATTCTC | 2000 | GAGAATTAAATTCCGGGGG |
| siRNA 259 | 259 | CCCCGGAATTTAATTCTCT | 2001 | AGAGAATTAAATTCCGGGG |
| siRNA 260 | 260 | CCCGGAATTTAATTCTCTA | 2002 | TAGAGAATTAAATTCCGGG |
| siRNA 261 | 261 | CCGGAATTTAATTCTCTAC | 2003 | GTAGAGAATTAAATTCCGG |
| siRNA 262 | 262 | CGGAATTTAATTCTCTACT | 2004 | AGTAGAGAATTAAATTCCG |
| siRNA 263 | 263 | GGAATTTAATTCTCTACTT | 2005 | AAGTAGAGAATTAAATTCC |
| siRNA 264 | 264 | GAATTTAATTCTCTACTTC | 2006 | GAAGTAGAGAATTAAATTC |
| siRNA 265 | 265 | AATTTAATTCTCTACTTCT | 2007 | AGAAGTAGAGAATTAAATT |
| siRNA 266 | 266 | ATTTAATTCTCTACTTCTA | 2008 | TAGAAGTAGAGAATTAAAT |
| siRNA 267 | 267 | TTTAATTCTCTACTTCTAT | 2009 | ATAGAAGTAGAGAATTAAA |
| siRNA 268 | 268 | TTAATTCTCTACTTCTATG | 2010 | CATAGAAGTAGAGAATTAA |
| siRNA 269 | 269 | TAATTCTCTACTTCTATGC | 2011 | GCATAGAAGTAGAGAATTA |
| siRNA 270 | 270 | AATTCTCTACTTCTATGCT | 2012 | AGCATAGAAGTAGAGAATT |
| siRNA 271 | 271 | ATTCTCTACTTCTATGCTC | 2013 | GAGCATAGAAGTAGAGAAT |
| siRNA 272 | 272 | TTCTCTACTTCTATGCTCT | 2014 | AGAGCATAGAAGTAGAGAA |
| siRNA 273 | 273 | TCTCTACTTCTATGCTCTT | 2015 | AAGAGCATAGAAGTAGAGA |
| siRNA 274 | 274 | CTCTACTTCTATGCTCTTT | 2016 | AAAGAGCATAGAAGTAGAG |
| siRNA 275 | 275 | TCTACTTCTATGCTCTTTT | 2017 | AAAAGAGCATAGAAGTAGA |
| siRNA 276 | 276 | CTACTTCTATGCTCTTTTA | 2018 | TAAAAGAGCATAGAAGTAG |
| siRNA 277 | 277 | TACTTCTATGCTCTTTTAT | 2019 | ATAAAAGAGCATAGAAGTA |
| siRNA 278 | 278 | ACTTCTATGCTCTTTTATT | 2020 | AATAAAAGAGCATAGAAGT |
| siRNA 279 | 279 | CTTCTATGCTCTTTTATTT | 2021 | AAATAAAAGAGCATAGAAG |
| siRNA 280 | 280 | TTCTATGCTCTTTTATTTC | 2022 | GAAATAAAAGAGCATAGAA |
| siRNA 281 | 281 | TCTATGCTCTTTTATTTCT | 2023 | AGAAATAAAAGAGCATAGA |
| siRNA 282 | 282 | CTATGCTCTTTTATTTCTC | 2024 | GAGAAATAAAAGAGCATAG |
| siRNA 283 | 283 | TATGCTCTTTTATTTCTCT | 2025 | AGAGAAATAAAAGAGCATA |
| siRNA 284 | 284 | ATGCTCTTTTATTTCTCTC | 2026 | GAGAGAAATAAAAGAGCAT |
| siRNA 285 | 285 | TGCTCTTTTATTTCTCTCT | 2027 | AGAGAGAAATAAAAGAGCA |
| siRNA 286 | 286 | GCTCTTTTATTTCTCTCTT | 2028 | AAGAGAGAAATAAAAGAGC |
| siRNA 287 | 287 | CTCTTTTATTTCTCTCTTC | 2029 | GAAGAGAGAAATAAAAGAG |
| siRNA 288 | 288 | TCTTTTATTTCTCTCTTCA | 2030 | TGAAGAGAGAAATAAAAGA |
| siRNA 289 | 289 | CTTTTATTTCTCTCTTCAA | 2031 | TTGAAGAGAGAAATAAAAG |
| siRNA 290 | 290 | TTTTATTTCTCTCTTCAAC | 2032 | GTTGAAGAGAGAAATAAAA |
| siRNA 291 | 291 | TTTATTTCTCTCTTCAACA | 2033 | TGTTGAAGAGAGAAATAAA |
| siRNA 292 | 292 | TTATTTCTCTCTTCAACAT | 2034 | ATGTTGAAGAGAGAAATAA |
| siRNA 293 | 293 | TATTTCTCTCTTCAACATG | 2035 | CATGTTGAAGAGAGAAATA |
| siRNA 294 | 294 | ATTTCTCTCTTCAACATGT | 2036 | ACATGTTGAAGAGAGAAAT |
| siRNA 295 | 295 | TTTCTCTCTTCAACATGTG | 2037 | CACATGTTGAAGAGAGAAA |
| siRNA 296 | 296 | TTCTCTCTTCAACATGTGT | 2038 | ACACATGTTGAAGAGAGAA |
| siRNA 297 | 297 | TCTCTCTTCAACATGTGTA | 2039 | TACACATGTTGAAGAGAGA |
| siRNA 298 | 298 | CTCTCTTCAACATGTGTAG | 2040 | CTACACATGTTGAAGAGAG |
| siRNA 299 | 299 | TCTCTTCAACATGTGTAGC | 2041 | GCTACACATGTTGAAGAGA |
| siRNA 300 | 300 | CTCTTCAACATGTGTAGCA | 2042 | TGCTACACATGTTGAAGAG |
| siRNA 301 | 301 | TCTTCAACATGTGTAGCAT | 2043 | ATGCTACACATGTTGAAGA |
| siRNA 302 | 302 | CTTCAACATGTGTAGCATA | 2044 | TATGCTACACATGTTGAAG |
| siRNA 303 | 303 | TTCAACATGTGTAGCATAT | 2045 | ATATGCTACACATGTTGAA |
| siRNA 304 | 304 | TCAACATGTGTAGCATATG | 2046 | CATATGCTACACATGTTGA |
| siRNA 305 | 305 | CAACATGTGTAGCATATGT | 2047 | ACATATGCTACACATGTTG |
| siRNA 306 | 306 | AACATGTGTAGCATATGTT | 2048 | AACATATGCTACACATGTT |
| siRNA 307 | 307 | ACATGTGTAGCATATGTTG | 2049 | CAACATATGCTACACATGT |
| siRNA 308 | 308 | CATGTGTAGCATATGTTGC | 2050 | GCAACATATGCTACACATG |
| siRNA 309 | 309 | ATGTGTAGCATATGTTGCT | 2051 | AGCAACATATGCTACACAT |
| siRNA 310 | 310 | TGTGTAGCATATGTTGCTA | 2052 | TAGCAACATATGCTACACA |
| siRNA 311 | 311 | GTGTAGCATATGTTGCTAC | 2053 | GTAGCAACATATGCTACAC |
| siRNA 312 | 312 | TGTAGCATATGTTGCTACC | 2054 | GGTAGCAACATATGCTACA |
| siRNA 313 | 313 | GTAGCATATGTTGCTACCA | 2055 | TGGTAGCAACATATGCTAC |
| siRNA 314 | 314 | TAGCATATGTTGCTACCAG | 2056 | CTGGTAGCAACATATGCTA |
| siRNA 315 | 315 | AGCATATGTTGCTACCAGA | 2057 | TCTGGTAGCAACATATGCT |
| siRNA 316 | 316 | GCATATGTTGCTACCAGAG | 2058 | CTCTGGTAGCAACATATGC |
| siRNA 317 | 317 | CATATGTTGCTACCAGAGA | 2059 | TCTCTGGTAGCAACATATG |
| siRNA 318 | 318 | ATATGTTGCTACCAGAGAC | 2060 | GTCTCTGGTAGCAACATAT |
| siRNA 319 | 319 | TATGTTGCTACCAGAGACA | 2061 | TGTCTCTGGTAGCAACATA |
| siRNA 320 | 320 | ATGTTGCTACCAGAGACAA | 2062 | TTGTCTCTGGTAGCAACAT |
| siRNA 321 | 321 | TGTTGCTACCAGAGACAAC | 2063 | GTTGTCTCTGGTAGCAACA |
| siRNA 322 | 322 | GTTGCTACCAGAGACAACT | 2064 | AGTTGTCTCTGGTAGCAAC |
| siRNA 323 | 323 | TTGCTACCAGAGACAACTG | 2065 | CAGTTGTCTCTGGTAGCAA |
| siRNA 324 | 324 | TGCTACCAGAGACAACTGC | 2066 | GCAGTTGTCTCTGGTAGCA |
| siRNA 325 | 325 | GCTACCAGAGACAACTGCT | 2067 | AGCAGTTGTCTCTGGTAGC |
| siRNA 326 | 326 | CTACCAGAGACAACTGCTG | 2068 | CAGCAGTTGTCTCTGGTAG |
| siRNA 327 | 327 | TACCAGAGACAACTGCTGC | 2069 | GCAGCAGTTGTCTCTGGTA |
| siRNA 328 | 328 | ACCAGAGACAACTGCTGCA | 2070 | TGCAGCAGTTGTCTCTGGT |
| siRNA 329 | 329 | CCAGAGACAACTGCTGCAT | 2071 | ATGCAGCAGTTGTCTCTGG |
| siRNA 330 | 330 | CAGAGACAACTGCTGCATC | 2072 | GATGCAGCAGTTGTCTCTG |
| siRNA 331 | 331 | AGAGACAACTGCTGCATCT | 2073 | AGATGCAGCAGTTGTCTCT |
| siRNA 332 | 332 | GAGACAACTGCTGCATCTT | 2074 | AAGATGCAGCAGTTGTCTC |
| siRNA 333 | 333 | AGACAACTGCTGCATCTTA | 2075 | TAAGATGCAGCAGTTGTCT |
| siRNA 334 | 334 | GACAACTGCTGCATCTTAG | 2076 | CTAAGATGCAGCAGTTGTC |
| siRNA 335 | 335 | ACAACTGCTGCATCTTAGA | 2077 | TCTAAGATGCAGCAGTTGT |
| siRNA 336 | 336 | CAACTGCTGCATCTTAGAT | 2078 | ATCTAAGATGCAGCAGTTG |
| siRNA 337 | 337 | AACTGCTGCATCTTAGATG | 2079 | CATCTAAGATGCAGCAGTT |
| siRNA 338 | 338 | ACTGCTGCATCTTAGATGA | 2080 | TCATCTAAGATGCAGCAGT |
| siRNA 339 | 339 | CTGCTGCATCTTAGATGAA | 2081 | TTCATCTAAGATGCAGCAG |
| siRNA 340 | 340 | TGCTGCATCTTAGATGAAA | 2082 | TTTCATCTAAGATGCAGCA |
| siRNA 341 | 341 | GCTGCATCTTAGATGAAAG | 2083 | CTTTCATCTAAGATGCAGC |
| siRNA 342 | 342 | CTGCATCTTAGATGAAAGA | 2084 | TCTTTCATCTAAGATGCAG |
| siRNA 343 | 343 | TGCATCTTAGATGAAAGAT | 2085 | ATCTTTCATCTAAGATGCA |
| siRNA 344 | 344 | GCATCTTAGATGAAAGATT | 2086 | AATCTTTCATCTAAGATGC |
| siRNA 345 | 345 | CATCTTAGATGAAAGATTC | 2087 | GAATCTTTCATCTAAGATG |
| siRNA 346 | 346 | ATCTTAGATGAAAGATTCG | 2088 | CGAATCTTTCATCTAAGAT |
| siRNA 347 | 347 | TCTTAGATGAAAGATTCGG | 2089 | CCGAATCTTTCATCTAAGA |
| siRNA 348 | 348 | CTTAGATGAAAGATTCGGT | 2090 | ACCGAATCTTTCATCTAAG |
| siRNA 349 | 349 | TTAGATGAAAGATTCGGTA | 2091 | TACCGAATCTTTCATCTAA |
| siRNA 350 | 350 | TAGATGAAAGATTCGGTAG | 2092 | CTACCGAATCTTTCATCTA |
| siRNA 351 | 351 | AGATGAAAGATTCGGTAGT | 2093 | ACTACCGAATCTTTCATCT |
| siRNA 352 | 352 | GATGAAAGATTCGGTAGTT | 2094 | AACTACCGAATCTTTCATC |
| siRNA 353 | 353 | ATGAAAGATTCGGTAGTTA | 2095 | TAACTACCGAATCTTTCAT |
| siRNA 354 | 354 | TGAAAGATTCGGTAGTTAT | 2096 | ATAACTACCGAATCTTTCA |
| siRNA 355 | 355 | GAAAGATTCGGTAGTTATT | 2097 | AATAACTACCGAATCTTTC |
| siRNA 356 | 356 | AAAGATTCGGTAGTTATTG | 2098 | CAATAACTACCGAATCTTT |
| siRNA 357 | 357 | AAGATTCGGTAGTTATTGT | 2099 | ACAATAACTACCGAATCTT |
| siRNA 358 | 358 | AGATTCGGTAGTTATTGTC | 2100 | GACAATAACTACCGAATCT |
| siRNA 359 | 359 | GATTCGGTAGTTATTGTCC | 2101 | GGACAATAACTACCGAATC |
| siRNA 360 | 360 | ATTCGGTAGTTATTGTCCA | 2102 | TGGACAATAACTACCGAAT |
| siRNA 361 | 361 | TTCGGTAGTTATTGTCCAA | 2103 | TTGGACAATAACTACCGAA |
| siRNA 362 | 362 | TCGGTAGTTATTGTCCAAC | 2104 | GTTGGACAATAACTACCGA |
| siRNA 363 | 363 | CGGTAGTTATTGTCCAACT | 2105 | AGTTGGACAATAACTACCG |
| siRNA 364 | 364 | GGTAGTTATTGTCCAACTA | 2106 | TAGTTGGACAATAACTACC |
| siRNA 365 | 365 | GTAGTTATTGTCCAACTAC | 2107 | GTAGTTGGACAATAACTAC |
| siRNA 366 | 366 | TAGTTATTGTCCAACTACC | 2108 | GGTAGTTGGACAATAACTA |
| siRNA 367 | 367 | AGTTATTGTCCAACTACCT | 2109 | AGGTAGTTGGACAATAACT |
| siRNA 368 | 368 | GTTATTGTCCAACTACCTG | 2110 | CAGGTAGTTGGACAATAAC |
| siRNA 369 | 369 | TTATTGTCCAACTACCTGT | 2111 | ACAGGTAGTTGGACAATAA |
| siRNA 370 | 370 | TATTGTCCAACTACCTGTG | 2112 | CACAGGTAGTTGGACAATA |
| siRNA 371 | 371 | ATTGTCCAACTACCTGTGG | 2113 | CCACAGGTAGTTGGACAAT |
| siRNA 372 | 372 | TTGTCCAACTACCTGTGGC | 2114 | GCCACAGGTAGTTGGACAA |
| siRNA 373 | 373 | TGTCCAACTACCTGTGGCA | 2115 | TGCCACAGGTAGTTGGACA |
| siRNA 374 | 374 | GTCCAACTACCTGTGGCAT | 2116 | ATGCCACAGGTAGTTGGAC |
| siRNA 375 | 375 | TCCAACTACCTGTGGCATT | 2117 | AATGCCACAGGTAGTTGGA |
| siRNA 376 | 376 | CCAACTACCTGTGGCATTG | 2118 | CAATGCCACAGGTAGTTGG |
| siRNA 377 | 377 | CAACTACCTGTGGCATTGC | 2119 | GCAATGCCACAGGTAGTTG |
| siRNA 378 | 378 | AACTACCTGTGGCATTGCA | 2120 | TGCAATGCCACAGGTAGTT |
| siRNA 379 | 379 | ACTACCTGTGGCATTGCAG | 2121 | CTGCAATGCCACAGGTAGT |
| siRNA 380 | 380 | CTACCTGTGGCATTGCAGA | 2122 | TCTGCAATGCCACAGGTAG |
| siRNA 381 | 381 | TACCTGTGGCATTGCAGAT | 2123 | ATCTGCAATGCCACAGGTA |
| siRNA 382 | 382 | ACCTGTGGCATTGCAGATT | 2124 | AATCTGCAATGCCACAGGT |
| siRNA 383 | 383 | CCTGTGGCATTGCAGATTT | 2125 | AAATCTGCAATGCCACAGG |
| siRNA 384 | 384 | CTGTGGCATTGCAGATTTC | 2126 | GAAATCTGCAATGCCACAG |
| siRNA 385 | 385 | TGTGGCATTGCAGATTTCC | 2127 | GGAAATCTGCAATGCCACA |
| siRNA 386 | 386 | GTGGCATTGCAGATTTCCT | 2128 | AGGAAATCTGCAATGCCAC |
| siRNA 387 | 387 | TGGCATTGCAGATTTCCTG | 2129 | CAGGAAATCTGCAATGCCA |
| siRNA 388 | 388 | GGCATTGCAGATTTCCTGT | 2130 | ACAGGAAATCTGCAATGCC |
| siRNA 389 | 389 | GCATTGCAGATTTCCTGTC | 2131 | GACAGGAAATCTGCAATGC |
| siRNA 390 | 390 | CATTGCAGATTTCCTGTCT | 2132 | AGACAGGAAATCTGCAATG |
| siRNA 391 | 391 | ATTGCAGATTTCCTGTCTA | 2133 | TAGACAGGAAATCTGCAAT |
| siRNA 392 | 392 | TTGCAGATTTCCTGTCTAC | 2134 | GTAGACAGGAAATCTGCAA |
| siRNA 393 | 393 | TGCAGATTTCCTGTCTACT | 2135 | AGTAGACAGGAAATCTGCA |
| siRNA 394 | 394 | GCAGATTTCCTGTCTACTT | 2136 | AAGTAGACAGGAAATCTGC |
| siRNA 395 | 395 | CAGATTTCCTGTCTACTTA | 2137 | TAAGTAGACAGGAAATCTG |
| siRNA 396 | 396 | AGATTTCCTGTCTACTTAT | 2138 | ATAAGTAGACAGGAAATCT |
| siRNA 397 | 397 | GATTTCCTGTCTACTTATC | 2139 | GATAAGTAGACAGGAAATC |
| siRNA 398 | 398 | ATTTCCTGTCTACTTATCA | 2140 | TGATAAGTAGACAGGAAAT |
| siRNA 399 | 399 | TTTCCTGTCTACTTATCAA | 2141 | TTGATAAGTAGACAGGAAA |
| siRNA 400 | 400 | TTCCTGTCTACTTATCAAA | 2142 | TTTGATAAGTAGACAGGAA |
| siRNA 401 | 401 | TCCTGTCTACTTATCAAAC | 2143 | GTTTGATAAGTAGACAGGA |
| siRNA 402 | 402 | CCTGTCTACTTATCAAACC | 2144 | GGTTTGATAAGTAGACAGG |
| siRNA 403 | 403 | CTGTCTACTTATCAAACCA | 2145 | TGGTTTGATAAGTAGACAG |
| siRNA 404 | 404 | TGTCTACTTATCAAACCAA | 2146 | TTGGTTTGATAAGTAGACA |
| siRNA 405 | 405 | GTCTACTTATCAAACCAAA | 2147 | TTTGGTTTGATAAGTAGAC |
| siRNA 406 | 406 | TCTACTTATCAAACCAAAG | 2148 | CTTTGGTTTGATAAGTAGA |
| siRNA 407 | 407 | CTACTTATCAAACCAAAGT | 2149 | ACTTTGGTTTGATAAGTAG |
| siRNA 408 | 408 | TACTTATCAAACCAAAGTA | 2150 | TACTTTGGTTTGATAAGTA |
| siRNA 409 | 409 | ACTTATCAAACCAAAGTAG | 2151 | CTACTTTGGTTTGATAAGT |
| siRNA 410 | 410 | CTTATCAAACCAAAGTAGA | 2152 | TCTACTTTGGTTTGATAAG |
| siRNA 411 | 411 | TTATCAAACCAAAGTAGAC | 2153 | GTCTACTTTGGTTTGATAA |
| siRNA 412 | 412 | TATCAAACCAAAGTAGACA | 2154 | TGTCTACTTTGGTTTGATA |
| siRNA 413 | 413 | ATCAAACCAAAGTAGACAA | 2155 | TTGTCTACTTTGGTTTGAT |
| siRNA 414 | 414 | TCAAACCAAAGTAGACAAG | 2156 | CTTGTCTACTTTGGTTTGA |
| siRNA 415 | 415 | CAAACCAAAGTAGACAAGG | 2157 | CCTTGTCTACTTTGGTTTG |
| siRNA 416 | 416 | AAACCAAAGTAGACAAGGA | 2158 | TCCTTGTCTACTTTGGTTT |
| siRNA 417 | 417 | AACCAAAGTAGACAAGGAT | 2159 | ATCCTTGTCTACTTTGGTT |
| siRNA 418 | 418 | ACCAAAGTAGACAAGGATC | 2160 | GATCCTTGTCTACTTTGGT |
| siRNA 419 | 419 | CCAAAGTAGACAAGGATCT | 2161 | AGATCCTTGTCTACTTTGG |
| siRNA 420 | 420 | CAAAGTAGACAAGGATCTA | 2162 | TAGATCCTTGTCTACTTTG |
| siRNA 421 | 421 | AAAGTAGACAAGGATCTAC | 2163 | GTAGATCCTTGTCTACTTT |
| siRNA 422 | 422 | AAGTAGACAAGGATCTACA | 2164 | TGTAGATCCTTGTCTACTT |
| siRNA 423 | 423 | AGTAGACAAGGATCTACAG | 2165 | CTGTAGATCCTTGTCTACT |
| siRNA 424 | 424 | GTAGACAAGGATCTACAGT | 2166 | ACTGTAGATCCTTGTCTAC |
| siRNA 425 | 425 | TAGACAAGGATCTACAGTC | 2167 | GACTGTAGATCCTTGTCTA |
| siRNA 426 | 426 | AGACAAGGATCTACAGTCT | 2168 | AGACTGTAGATCCTTGTCT |
| siRNA 427 | 427 | GACAAGGATCTACAGTCTT | 2169 | AAGACTGTAGATCCTTGTC |
| siRNA 428 | 428 | ACAAGGATCTACAGTCTTT | 2170 | AAAGACTGTAGATCCTTGT |
| siRNA 429 | 429 | CAAGGATCTACAGTCTTTG | 2171 | CAAAGACTGTAGATCCTTG |
| siRNA 430 | 430 | AAGGATCTACAGTCTTTGG | 2172 | CCAAAGACTGTAGATCCTT |
| siRNA 431 | 431 | AGGATCTACAGTCTTTGGA | 2173 | TCCAAAGACTGTAGATCCT |
| siRNA 432 | 432 | GGATCTACAGTCTTTGGAA | 2174 | TTCCAAAGACTGTAGATCC |
| siRNA 433 | 433 | GATCTACAGTCTTTGGAAG | 2175 | CTTCCAAAGACTGTAGATC |
| siRNA 434 | 434 | ATCTACAGTCTTTGGAAGA | 2176 | TCTTCCAAAGACTGTAGAT |
| siRNA 435 | 435 | TCTACAGTCTTTGGAAGAC | 2177 | GTCTTCCAAAGACTGTAGA |
| siRNA 436 | 436 | CTACAGTCTTTGGAAGACA | 2178 | TGTCTTCCAAAGACTGTAG |
| siRNA 437 | 437 | TACAGTCTTTGGAAGACAT | 2179 | ATGTCTTCCAAAGACTGTA |
| siRNA 438 | 438 | ACAGTCTTTGGAAGACATC | 2180 | GATGTCTTCCAAAGACTGT |
| siRNA 439 | 439 | CAGTCTTTGGAAGACATCT | 2181 | AGATGTCTTCCAAAGACTG |
| siRNA 440 | 440 | AGTCTTTGGAAGACATCTT | 2182 | AAGATGTCTTCCAAAGACT |
| siRNA 441 | 441 | GTCTTTGGAAGACATCTTA | 2183 | TAAGATGTCTTCCAAAGAC |
| siRNA 442 | 442 | TCTTTGGAAGACATCTTAC | 2184 | GTAAGATGTCTTCCAAAGA |
| siRNA 443 | 443 | CTTTGGAAGACATCTTACA | 2185 | TGTAAGATGTCTTCCAAAG |
| siRNA 444 | 444 | TTTGGAAGACATCTTACAT | 2186 | ATGTAAGATGTCTTCCAAA |
| siRNA 445 | 445 | TTGGAAGACATCTTACATC | 2187 | GATGTAAGATGTCTTCCAA |
| siRNA 446 | 446 | TGGAAGACATCTTACATCA | 2188 | TGATGTAAGATGTCTTCCA |
| siRNA 447 | 447 | GGAAGACATCTTACATCAA | 2189 | TTGATGTAAGATGTCTTCC |
| siRNA 448 | 448 | GAAGACATCTTACATCAAG | 2190 | CTTGATGTAAGATGTCTTC |
| siRNA 449 | 449 | AAGACATCTTACATCAAGT | 2191 | ACTTGATGTAAGATGTCTT |
| siRNA 450 | 450 | AGACATCTTACATCAAGTT | 2192 | AACTTGATGTAAGATGTCT |
| siRNA 451 | 451 | GACATCTTACATCAAGTTG | 2193 | CAACTTGATGTAAGATGTC |
| siRNA 452 | 452 | ACATCTTACATCAAGTTGA | 2194 | TCAACTTGATGTAAGATGT |
| siRNA 453 | 453 | CATCTTACATCAAGTTGAA | 2195 | TTCAACTTGATGTAAGATG |
| siRNA 454 | 454 | ATCTTACATCAAGTTGAAA | 2196 | TTTCAACTTGATGTAAGAT |
| siRNA 455 | 455 | TCTTACATCAAGTTGAAAA | 2197 | TTTTCAACTTGATGTAAGA |
| siRNA 456 | 456 | CTTACATCAAGTTGAAAAC | 2198 | GTTTTCAACTTGATGTAAG |
| siRNA 457 | 457 | TTACATCAAGTTGAAAACA | 2199 | TGTTTTCAACTTGATGTAA |
| siRNA 458 | 458 | TACATCAAGTTGAAAACAA | 2200 | TTGTTTTCAACTTGATGTA |
| siRNA 459 | 459 | ACATCAAGTTGAAAACAAA | 2201 | TTTGTTTTCAACTTGATGT |
| siRNA 460 | 460 | CATCAAGTTGAAAACAAAA | 2202 | TTTTGTTTTCAACTTGATG |
| siRNA 461 | 461 | ATCAAGTTGAAAACAAAAC | 2203 | GTTTTGTTTTCAACTTGAT |
| siRNA 462 | 462 | TCAAGTTGAAAACAAAACA | 2204 | TGTTTTGTTTTCAACTTGA |
| siRNA 463 | 463 | CAAGTTGAAAACAAAACAT | 2205 | ATGTTTTGTTTTCAACTTG |
| siRNA 464 | 464 | AAGTTGAAAACAAAACATC | 2206 | GATGTTTTGTTTTCAACTT |
| siRNA 465 | 465 | AGTTGAAAACAAAACATCA | 2207 | TGATGTTTTGTTTTCAACT |
| siRNA 466 | 466 | GTTGAAAACAAAACATCAG | 2208 | CTGATGTTTTGTTTTCAAC |
| siRNA 467 | 467 | TTGAAAACAAAACATCAGA | 2209 | TCTGATGTTTTGTTTTCAA |
| siRNA 468 | 468 | TGAAAACAAAACATCAGAA | 2210 | TTCTGATGTTTTGTTTTCA |
| siRNA 469 | 469 | GAAAACAAAACATCAGAAG | 2211 | CTTCTGATGTTTTGTTTTC |
| siRNA 470 | 470 | AAAACAAAACATCAGAAGT | 2212 | ACTTCTGATGTTTTGTTTT |
| siRNA 471 | 471 | AAACAAAACATCAGAAGTC | 2213 | GACTTCTGATGTTTTGTTT |
| siRNA 472 | 472 | AACAAAACATCAGAAGTCA | 2214 | TGACTTCTGATGTTTTGTT |
| siRNA 473 | 473 | ACAAAACATCAGAAGTCAA | 2215 | TTGACTTCTGATGTTTTGT |
| siRNA 474 | 474 | CAAAACATCAGAAGTCAAA | 2216 | TTTGACTTCTGATGTTTTG |
| siRNA 475 | 475 | AAAACATCAGAAGTCAAAC | 2217 | GTTTGACTTCTGATGTTTT |
| siRNA 476 | 476 | AAACATCAGAAGTCAAACA | 2218 | TGTTTGACTTCTGATGTTT |
| siRNA 477 | 477 | AACATCAGAAGTCAAACAG | 2219 | CTGTTTGACTTCTGATGTT |
| siRNA 478 | 478 | ACATCAGAAGTCAAACAGC | 2220 | GCTGTTTGACTTCTGATGT |
| siRNA 479 | 479 | CATCAGAAGTCAAACAGCT | 2221 | AGCTGTTTGACTTCTGATG |
| siRNA 480 | 480 | ATCAGAAGTCAAACAGCTG | 2222 | CAGCTGTTTGACTTCTGAT |
| siRNA 481 | 481 | TCAGAAGTCAAACAGCTGA | 2223 | TCAGCTGTTTGACTTCTGA |
| siRNA 482 | 482 | CAGAAGTCAAACAGCTGAT | 2224 | ATCAGCTGTTTGACTTCTG |
| siRNA 483 | 483 | AGAAGTCAAACAGCTGATA | 2225 | TATCAGCTGTTTGACTTCT |
| siRNA 484 | 484 | GAAGTCAAACAGCTGATAA | 2226 | TTATCAGCTGTTTGACTTC |
| siRNA 485 | 485 | AAGTCAAACAGCTGATAAA | 2227 | TTTATCAGCTGTTTGACTT |
| siRNA 486 | 486 | AGTCAAACAGCTGATAAAA | 2228 | TTTTATCAGCTGTTTGACT |
| siRNA 487 | 487 | GTCAAACAGCTGATAAAAG | 2229 | CTTTTATCAGCTGTTTGAC |
| siRNA 488 | 488 | TCAAACAGCTGATAAAAGC | 2230 | GCTTTTATCAGCTGTTTGA |
| siRNA 489 | 489 | CAAACAGCTGATAAAAGCA | 2231 | TGCTTTTATCAGCTGTTTG |
| siRNA 490 | 490 | AAACAGCTGATAAAAGCAA | 2232 | TTGCTTTTATCAGCTGTTT |
| siRNA 491 | 491 | AACAGCTGATAAAAGCAAT | 2233 | ATTGCTTTTATCAGCTGTT |
| siRNA 492 | 492 | ACAGCTGATAAAAGCAATC | 2234 | GATTGCTTTTATCAGCTGT |
| siRNA 493 | 493 | CAGCTGATAAAAGCAATCC | 2235 | GGATTGCTTTTATCAGCTG |
| siRNA 494 | 494 | AGCTGATAAAAGCAATCCA | 2236 | TGGATTGCTTTTATCAGCT |
| siRNA 495 | 495 | GCTGATAAAAGCAATCCAA | 2237 | TTGGATTGCTTTTATCAGC |
| siRNA 496 | 496 | CTGATAAAAGCAATCCAAC | 2238 | GTTGGATTGCTTTTATCAG |
| siRNA 497 | 497 | TGATAAAAGCAATCCAACT | 2239 | AGTTGGATTGCTTTTATCA |
| siRNA 498 | 498 | GATAAAAGCAATCCAACTC | 2240 | GAGTTGGATTGCTTTTATC |
| siRNA 499 | 499 | ATAAAAGCAATCCAACTCA | 2241 | TGAGTTGGATTGCTTTTAT |
| siRNA 500 | 500 | TAAAAGCAATCCAACTCAC | 2242 | GTGAGTTGGATTGCTTTTA |
| siRNA 501 | 501 | AAAAGCAATCCAACTCACT | 2243 | AGTGAGTTGGATTGCTTTT |
| siRNA 502 | 502 | AAAGCAATCCAACTCACTT | 2244 | AAGTGAGTTGGATTGCTTT |
| siRNA 503 | 503 | AAGCAATCCAACTCACTTA | 2245 | TAAGTGAGTTGGATTGCTT |
| siRNA 504 | 504 | AGCAATCCAACTCACTTAT | 2246 | ATAAGTGAGTTGGATTGCT |
| siRNA 505 | 505 | GCAATCCAACTCACTTATA | 2247 | TATAAGTGAGTTGGATTGC |
| siRNA 506 | 506 | CAATCCAACTCACTTATAA | 2248 | TTATAAGTGAGTTGGATTG |
| siRNA 507 | 507 | AATCCAACTCACTTATAAT | 2249 | ATTATAAGTGAGTTGGATT |
| siRNA 508 | 508 | ATCCAACTCACTTATAATC | 2250 | GATTATAAGTGAGTTGGAT |
| siRNA 509 | 509 | TCCAACTCACTTATAATCC | 2251 | GGATTATAAGTGAGTTGGA |
| siRNA 510 | 510 | CCAACTCACTTATAATCCT | 2252 | AGGATTATAAGTGAGTTGG |
| siRNA 511 | 511 | CAACTCACTTATAATCCTG | 2253 | CAGGATTATAAGTGAGTTG |
| siRNA 512 | 512 | AACTCACTTATAATCCTGA | 2254 | TCAGGATTATAAGTGAGTT |
| siRNA 513 | 513 | ACTCACTTATAATCCTGAT | 2255 | ATCAGGATTATAAGTGAGT |
| siRNA 514 | 514 | CTCACTTATAATCCTGATG | 2256 | CATCAGGATTATAAGTGAG |
| siRNA 515 | 515 | TCACTTATAATCCTGATGA | 2257 | TCATCAGGATTATAAGTGA |
| siRNA 516 | 516 | CACTTATAATCCTGATGAA | 2258 | TTCATCAGGATTATAAGTG |
| siRNA 517 | 517 | ACTTATAATCCTGATGAAT | 2259 | ATTCATCAGGATTATAAGT |
| siRNA 518 | 518 | CTTATAATCCTGATGAATC | 2260 | GATTCATCAGGATTATAAG |
| siRNA 519 | 519 | TTATAATCCTGATGAATCA | 2261 | TGATTCATCAGGATTATAA |
| siRNA 520 | 520 | TATAATCCTGATGAATCAT | 2262 | ATGATTCATCAGGATTATA |
| siRNA 521 | 521 | ATAATCCTGATGAATCATC | 2263 | GATGATTCATCAGGATTAT |
| siRNA 522 | 522 | TAATCCTGATGAATCATCA | 2264 | TGATGATTCATCAGGATTA |
| siRNA 523 | 523 | AATCCTGATGAATCATCAA | 2265 | TTGATGATTCATCAGGATT |
| siRNA 524 | 524 | ATCCTGATGAATCATCAAA | 2266 | TTTGATGATTCATCAGGAT |
| siRNA 525 | 525 | TCCTGATGAATCATCAAAA | 2267 | TTTTGATGATTCATCAGGA |
| siRNA 526 | 526 | CCTGATGAATCATCAAAAC | 2268 | GTTTTGATGATTCATCAGG |
| siRNA 527 | 527 | CTGATGAATCATCAAAACC | 2269 | GGTTTTGATGATTCATCAG |
| siRNA 528 | 528 | TGATGAATCATCAAAACCA | 2270 | TGGTTTTGATGATTCATCA |
| siRNA 529 | 529 | GATGAATCATCAAAACCAA | 2271 | TTGGTTTTGATGATTCATC |
| siRNA 530 | 530 | ATGAATCATCAAAACCAAA | 2272 | TTTGGTTTTGATGATTCAT |
| siRNA 531 | 531 | TGAATCATCAAAACCAAAT | 2273 | ATTTGGTTTTGATGATTCA |
| siRNA 532 | 532 | GAATCATCAAAACCAAATA | 2274 | TATTTGGTTTTGATGATTC |
| siRNA 533 | 533 | AATCATCAAAACCAAATAT | 2275 | ATATTTGGTTTTGATGATT |
| siRNA 534 | 534 | ATCATCAAAACCAAATATG | 2276 | CATATTTGGTTTTGATGAT |
| siRNA 535 | 535 | TCATCAAAACCAAATATGA | 2277 | TCATATTTGGTTTTGATGA |
| siRNA 536 | 536 | CATCAAAACCAAATATGAT | 2278 | ATCATATTTGGTTTTGATG |
| siRNA 537 | 537 | ATCAAAACCAAATATGATA | 2279 | TATCATATTTGGTTTTGAT |
| siRNA 538 | 538 | TCAAAACCAAATATGATAG | 2280 | CTATCATATTTGGTTTTGA |
| siRNA 539 | 539 | CAAAACCAAATATGATAGA | 2281 | TCTATCATATTTGGTTTTG |
| siRNA 540 | 540 | AAAACCAAATATGATAGAC | 2282 | GTCTATCATATTTGGTTTT |
| siRNA 541 | 541 | AAACCAAATATGATAGACG | 2283 | CGTCTATCATATTTGGTTT |
| siRNA 542 | 542 | AACCAAATATGATAGACGC | 2284 | GCGTCTATCATATTTGGTT |
| siRNA 543 | 543 | ACCAAATATGATAGACGCT | 2285 | AGCGTCTATCATATTTGGT |
| siRNA 544 | 544 | CCAAATATGATAGACGCTG | 2286 | CAGCGTCTATCATATTTGG |
| siRNA 545 | 545 | CAAATATGATAGACGCTGC | 2287 | GCAGCGTCTATCATATTTG |
| siRNA 546 | 546 | AAATATGATAGACGCTGCT | 2288 | AGCAGCGTCTATCATATTT |
| siRNA 547 | 547 | AATATGATAGACGCTGCTA | 2289 | TAGCAGCGTCTATCATATT |
| siRNA 548 | 548 | ATATGATAGACGCTGCTAC | 2290 | GTAGCAGCGTCTATCATAT |
| siRNA 549 | 549 | TATGATAGACGCTGCTACT | 2291 | AGTAGCAGCGTCTATCATA |
| siRNA 550 | 550 | ATGATAGACGCTGCTACTT | 2292 | AAGTAGCAGCGTCTATCAT |
| siRNA 551 | 551 | TGATAGACGCTGCTACTTT | 2293 | AAAGTAGCAGCGTCTATCA |
| siRNA 552 | 552 | GATAGACGCTGCTACTTTG | 2294 | CAAAGTAGCAGCGTCTATC |
| siRNA 553 | 553 | ATAGACGCTGCTACTTTGA | 2295 | TCAAAGTAGCAGCGTCTAT |
| siRNA 554 | 554 | TAGACGCTGCTACTTTGAA | 2296 | TTCAAAGTAGCAGCGTCTA |
| siRNA 555 | 555 | AGACGCTGCTACTTTGAAG | 2297 | CTTCAAAGTAGCAGCGTCT |
| siRNA 556 | 556 | GACGCTGCTACTTTGAAGT | 2298 | ACTTCAAAGTAGCAGCGTC |
| siRNA 557 | 557 | ACGCTGCTACTTTGAAGTC | 2299 | GACTTCAAAGTAGCAGCGT |
| siRNA 558 | 558 | CGCTGCTACTTTGAAGTCC | 2300 | GGACTTCAAAGTAGCAGCG |
| siRNA 559 | 559 | GCTGCTACTTTGAAGTCCA | 2301 | TGGACTTCAAAGTAGCAGC |
| siRNA 560 | 560 | CTGCTACTTTGAAGTCCAG | 2302 | CTGGACTTCAAAGTAGCAG |
| siRNA 561 | 561 | TGCTACTTTGAAGTCCAGG | 2303 | CCTGGACTTCAAAGTAGCA |
| siRNA 562 | 562 | GCTACTTTGAAGTCCAGGA | 2304 | TCCTGGACTTCAAAGTAGC |
| siRNA 563 | 563 | CTACTTTGAAGTCCAGGAA | 2305 | TTCCTGGACTTCAAAGTAG |
| siRNA 564 | 564 | TACTTTGAAGTCCAGGAAA | 2306 | TTTCCTGGACTTCAAAGTA |
| siRNA 565 | 565 | ACTTTGAAGTCCAGGAAAA | 2307 | TTTTCCTGGACTTCAAAGT |
| siRNA 566 | 566 | CTTTGAAGTCCAGGAAAAT | 2308 | ATTTTCCTGGACTTCAAAG |
| siRNA 567 | 567 | TTTGAAGTCCAGGAAAATG | 2309 | CATTTTCCTGGACTTCAAA |
| siRNA 568 | 568 | TTGAAGTCCAGGAAAATGT | 2310 | ACATTTTCCTGGACTTCAA |
| siRNA 569 | 569 | TGAAGTCCAGGAAAATGTT | 2311 | AACATTTTCCTGGACTTCA |
| siRNA 570 | 570 | GAAGTCCAGGAAAATGTTA | 2312 | TAACATTTTCCTGGACTTC |
| siRNA 571 | 571 | AAGTCCAGGAAAATGTTAG | 2313 | CTAACATTTTCCTGGACTT |
| siRNA 572 | 572 | AGTCCAGGAAAATGTTAGA | 2314 | TCTAACATTTTCCTGGACT |
| siRNA 573 | 573 | GTCCAGGAAAATGTTAGAA | 2315 | TTCTAACATTTTCCTGGAC |
| siRNA 574 | 574 | TCCAGGAAAATGTTAGAAG | 2316 | CTTCTAACATTTTCCTGGA |
| siRNA 575 | 575 | CCAGGAAAATGTTAGAAGA | 2317 | TCTTCTAACATTTTCCTGG |
| siRNA 576 | 576 | CAGGAAAATGTTAGAAGAA | 2318 | TTCTTCTAACATTTTCCTG |
| siRNA 577 | 577 | AGGAAAATGTTAGAAGAAA | 2319 | TTTCTTCTAACATTTTCCT |
| siRNA 578 | 578 | GGAAAATGTTAGAAGAAAT | 2320 | ATTTCTTCTAACATTTTCC |
| siRNA 579 | 579 | GAAAATGTTAGAAGAAATT | 2321 | AATTTCTTCTAACATTTTC |
| siRNA 580 | 580 | AAAATGTTAGAAGAAATTA | 2322 | TAATTTCTTCTAACATTTT |
| siRNA 581 | 581 | AAATGTTAGAAGAAATTAT | 2323 | ATAATTTCTTCTAACATTT |
| siRNA 582 | 582 | AATGTTAGAAGAAATTATG | 2324 | CATAATTTCTTCTAACATT |
| siRNA 583 | 583 | ATGTTAGAAGAAATTATGA | 2325 | TCATAATTTCTTCTAACAT |
| siRNA 584 | 584 | TGTTAGAAGAAATTATGAA | 2326 | TTCATAATTTCTTCTAACA |
| siRNA 585 | 585 | GTTAGAAGAAATTATGAAA | 2327 | TTTCATAATTTCTTCTAAC |
| siRNA 586 | 586 | TTAGAAGAAATTATGAAAT | 2328 | ATTTCATAATTTCTTCTAA |
| siRNA 587 | 587 | TAGAAGAAATTATGAAATA | 2329 | TATTTCATAATTTCTTCTA |
| siRNA 588 | 588 | AGAAGAAATTATGAAATAT | 2330 | ATATTTCATAATTTCTTCT |
| siRNA 589 | 589 | GAAGAAATTATGAAATATG | 2331 | CATATTTCATAATTTCTTC |
| siRNA 590 | 590 | AAGAAATTATGAAATATGA | 2332 | TCATATTTCATAATTTCTT |
| siRNA 591 | 591 | AGAAATTATGAAATATGAA | 2333 | TTCATATTTCATAATTTCT |
| siRNA 592 | 592 | GAAATTATGAAATATGAAG | 2334 | CTTCATATTTCATAATTTC |
| siRNA 593 | 593 | AAATTATGAAATATGAAGC | 2335 | GCTTCATATTTCATAATTT |
| siRNA 594 | 594 | AATTATGAAATATGAAGCA | 2336 | TGCTTCATATTTCATAATT |
| siRNA 595 | 595 | ATTATGAAATATGAAGCAT | 2337 | ATGCTTCATATTTCATAAT |
| siRNA 596 | 596 | TTATGAAATATGAAGCATC | 2338 | GATGCTTCATATTICATAA |
| siRNA 597 | 597 | TATGAAATATGAAGCATCG | 2339 | CGATGCTTCATATTTCATA |
| siRNA 598 | 598 | ATGAAATATGAAGCATCGA | 2340 | TCGATGCTTCATATTTCAT |
| siRNA 599 | 599 | TGAAATATGAAGCATCGAT | 2341 | ATCGATGCTTCATATTTCA |
| siRNA 600 | 600 | GAAATATGAAGCATCGATT | 2342 | AATCGATGCTTCATATTTC |
| siRNA 601 | 601 | AAATATGAAGCATCGATTT | 2343 | AAATCGATGCTTCATATTT |
| siRNA 602 | 602 | AATATGAAGCATCGATTTT | 2344 | AAAATCGATGCTTCATATT |
| siRNA 603 | 603 | ATATGAAGCATCGATTTTA | 2345 | TAAAATCGATGCTTCATAT |
| siRNA 604 | 604 | TATGAAGCATCGATTTTAA | 2346 | TTAAAATCGATGCTTCATA |
| siRNA 605 | 605 | ATGAAGCATCGATTTTAAC | 2347 | GTTAAAATCGATGCTTCAT |
| siRNA 606 | 606 | TGAAGCATCGATTTTAACA | 2348 | TGTTAAAATCGATGCTTCA |
| siRNA 607 | 607 | GAAGCATCGATTTTAACAC | 2349 | GTGTTAAAATCGATGCTTC |
| siRNA 608 | 608 | AAGCATCGATTTTAACACA | 2350 | TGTGTTAAAATCGATGCTT |
| siRNA 609 | 609 | AGCATCGATTTTAACACAT | 2351 | ATGTGTTAAAATCGATGCT |
| siRNA 610 | 610 | GCATCGATTTTAACACATG | 2352 | CATGTGTTAAAATCGATGC |
| siRNA 611 | 611 | CATCGATTTTAACACATGA | 2353 | TCATGTGTTAAAATCGATG |
| siRNA 612 | 612 | ATCGATTTTAACACATGAC | 2354 | GTCATGTGTTAAAATCGAT |
| siRNA 613 | 613 | TCGATTTTAACACATGACT | 2355 | AGTCATGTGTTAAAATCGA |
| siRNA 614 | 614 | CGATTTTAACACATGACTC | 2356 | GAGTCATGTGTTAAAATCG |
| siRNA 615 | 615 | GATTTTAACACATGACTCA | 2357 | TGAGTCATGTGTTAAAATC |
| siRNA 616 | 616 | ATTTTAACACATGACTCAA | 2358 | TTGAGTCATGTGTTAAAAT |
| siRNA 617 | 617 | TTTTAACACATGACTCAAG | 2359 | CTTGAGTCATGTGTTAAAA |
| siRNA 618 | 618 | TTTAACACATGACTCAAGT | 2360 | ACTTGAGTCATGTGTTAAA |
| siRNA 619 | 619 | TTAACACATGACTCAAGTA | 2361 | TACTTGAGTCATGTGTTAA |
| siRNA 620 | 620 | TAACACATGACTCAAGTAT | 2362 | ATACTTGAGTCATGTGTTA |
| siRNA 621 | 621 | AACACATGACTCAAGTATT | 2363 | AATACTTGAGTCATGTGTT |
| siRNA 622 | 622 | ACACATGACTCAAGTATTC | 2364 | GAATACTTGAGTCATGTGT |
| siRNA 623 | 623 | CACATGACTCAAGTATTCG | 2365 | CGAATACTTGAGTCATGTG |
| siRNA 624 | 624 | ACATGACTCAAGTATTCGA | 2366 | TCGAATACTTGAGTCATGT |
| siRNA 625 | 625 | CATGACTCAAGTATTCGAT | 2367 | ATCGAATACTTGAGTCATG |
| siRNA 626 | 626 | ATGACTCAAGTATTCGATA | 2368 | TATCGAATACTTGAGTCAT |
| siRNA 627 | 627 | TGACTCAAGTATTCGATAT | 2369 | ATATCGAATACTTGAGTCA |
| siRNA 628 | 628 | GACTCAAGTATTCGATATT | 2370 | AATATCGAATACTTGAGTC |
| siRNA 629 | 629 | ACTCAAGTATTCGATATTT | 2371 | AAATATCGAATACTTGAGT |
| siRNA 630 | 630 | CTCAAGTATTCGATATTTG | 2372 | CAAATATCGAATACTTGAG |
| siRNA 631 | 631 | TCAAGTATTCGATATTTGC | 2373 | GCAAATATCGAATACTTGA |
| siRNA 632 | 632 | CAAGTATTCGATATTTGCA | 2374 | TGCAAATATCGAATACTTG |
| siRNA 633 | 633 | AAGTATTCGATATTTGCAG | 2375 | CTGCAAATATCGAATACTT |
| siRNA 634 | 634 | AGTATTCGATATTTGCAGG | 2376 | CCTGCAAATATCGAATACT |
| siRNA 635 | 635 | GTATTCGATATTTGCAGGA | 2377 | TCCTGCAAATATCGAATAC |
| siRNA 636 | 636 | TATTCGATATTTGCAGGAA | 2378 | TTCCTGCAAATATCGAATA |
| siRNA 637 | 637 | ATTCGATATTTGCAGGAAA | 2379 | TTTCCTGCAAATATCGAAT |
| siRNA 638 | 638 | TTCGATATTTGCAGGAAAT | 2380 | ATTTCCTGCAAATATCGAA |
| siRNA 639 | 639 | TCGATATTTGCAGGAAATA | 2381 | TATTTCCTGCAAATATCGA |
| siRNA 640 | 640 | CGATATTTGCAGGAAATAT | 2382 | ATATTTCCTGCAAATATCG |
| siRNA 641 | 641 | GATATTTGCAGGAAATATA | 2383 | TATATTTCCTGCAAATATC |
| siRNA 642 | 642 | ATATTTGCAGGAAATATAT | 2384 | ATATATTTCCTGCAAATAT |
| siRNA 643 | 643 | TATTTGCAGGAAATATATA | 2385 | TATATATTTCCTGCAAATA |
| siRNA 644 | 644 | ATTTGCAGGAAATATATAA | 2386 | TTATATATTTCCTGCAAAT |
| siRNA 645 | 645 | TTTGCAGGAAATATATAAT | 2387 | ATTATATATTTCCTGCAAA |
| siRNA 646 | 646 | TTGCAGGAAATATATAATT | 2388 | AATTATATATTTCCTGCAA |
| siRNA 647 | 647 | TGCAGGAAATATATAATTC | 2389 | GAATTATATATTTCCTGCA |
| siRNA 648 | 648 | GCAGGAAATATATAATTCA | 2390 | TGAATTATATATTTCCTGC |
| siRNA 649 | 649 | CAGGAAATATATAATTCAA | 2391 | TTGAATTATATATTTCCTG |
| siRNA 650 | 650 | AGGAAATATATAATTCAAA | 2392 | TTTGAATTATATATTTCCT |
| siRNA 651 | 651 | GGAAATATATAATTCAAAT | 2393 | ATTTGAATTATATATTTCC |
| siRNA 652 | 652 | GAAATATATAATTCAAATA | 2394 | TATTTGAATTATATATTTC |
| siRNA 653 | 653 | AAATATATAATTCAAATAA | 2395 | TTATTTGAATTATATATTT |
| siRNA 654 | 654 | AATATATAATTCAAATAAT | 2396 | ATTATTTGAATTATATATT |
| siRNA 655 | 655 | ATATATAATTCAAATAATC | 2397 | GATTATTTGAATTATATAT |
| siRNA 656 | 656 | TATATAATTCAAATAATCA | 2398 | TGATTATTTGAATTATATA |
| siRNA 657 | 657 | ATATAATTCAAATAATCAA | 2399 | TTGATTATTTGAATTATAT |
| siRNA 658 | 658 | TATAATTCAAATAATCAAA | 2400 | TTTGATTATTTGAATTATA |
| siRNA 659 | 659 | ATAATTCAAATAATCAAAA | 2401 | TTTTGATTATTTGAATTAT |
| siRNA 660 | 660 | TAATTCAAATAATCAAAAG | 2402 | CTTTTGATTATTTGAATTA |
| siRNA 661 | 661 | AATTCAAATAATCAAAAGA | 2403 | TCTTTTGATTATTTGAATT |
| siRNA 662 | 662 | ATTCAAATAATCAAAAGAT | 2404 | ATCTTTTGATTATTTGAAT |
| siRNA 663 | 663 | TTCAAATAATCAAAAGATT | 2405 | AATCTTTTGATTATTTGAA |
| siRNA 664 | 664 | TCAAATAATCAAAAGATTG | 2406 | CAATCTTTTGATTATTTGA |
| siRNA 665 | 665 | CAAATAATCAAAAGATTGT | 2407 | ACAATCTTTTGATTATTTG |
| siRNA 666 | 666 | AAATAATCAAAAGATTGTT | 2408 | AACAATCTTTTGATTATTT |
| siRNA 667 | 667 | AATAATCAAAAGATTGTTA | 2409 | TAACAATCTTTTGATTATT |
| siRNA 668 | 668 | ATAATCAAAAGATTGTTAA | 2410 | TTAACAATCTTTTGATTAT |
| siRNA 669 | 669 | TAATCAAAAGATTGTTAAC | 2411 | GTTAACAATCTTTTGATTA |
| siRNA 670 | 670 | AATCAAAAGATTGTTAACC | 2412 | GGTTAACAATCTTTTGATT |
| siRNA 671 | 671 | ATCAAAAGATTGTTAACCT | 2413 | AGGTTAACAATCTTTTGAT |
| siRNA 672 | 672 | TCAAAAGATTGTTAACCTG | 2414 | CAGGTTAACAATCTTTTGA |
| siRNA 673 | 673 | CAAAAGATTGTTAACCTGA | 2415 | TCAGGTTAACAATCTTTTG |
| siRNA 674 | 674 | AAAAGATTGTTAACCTGAA | 2416 | TTCAGGTTAACAATCTTTT |
| siRNA 675 | 675 | AAAGATTGTTAACCTGAAA | 2417 | TTTCAGGTTAACAATCTTT |
| siRNA 676 | 676 | AAGATTGTTAACCTGAAAG | 2418 | CTTTCAGGTTAACAATCTT |
| siRNA 677 | 677 | AGATTGTTAACCTGAAAGA | 2419 | TCTTTCAGGTTAACAATCT |
| siRNA 678 | 678 | GATTGTTAACCTGAAAGAG | 2420 | CTCTTTCAGGTTAACAATC |
| siRNA 679 | 679 | ATTGTTAACCTGAAAGAGA | 2421 | TCTCTTTCAGGTTAACAAT |
| siRNA 680 | 680 | TTGTTAACCTGAAAGAGAA | 2422 | TTCTCTTTCAGGTTAACAA |
| siRNA 681 | 681 | TGTTAACCTGAAAGAGAAG | 2423 | CTTCTCTTTCAGGTTAACA |
| siRNA 682 | 682 | GTTAACCTGAAAGAGAAGG | 2424 | CCTTCTCTTTCAGGTTAAC |
| siRNA 683 | 683 | TTAACCTGAAAGAGAAGGT | 2425 | ACCTTCTCTTTCAGGTTAA |
| siRNA 684 | 684 | TAACCTGAAAGAGAAGGTA | 2426 | TACCTTCTCTTTCAGGTTA |
| siRNA 685 | 685 | AACCTGAAAGAGAAGGTAG | 2427 | CTACCTTCTCTTTCAGGTT |
| siRNA 686 | 686 | ACCTGAAAGAGAAGGTAGC | 2428 | GCTACCTTCTCTTTCAGGT |
| siRNA 687 | 687 | CCTGAAAGAGAAGGTAGCC | 2429 | GGCTACCTTCTCTTTCAGG |
| siRNA 688 | 688 | CTGAAAGAGAAGGTAGCCC | 2430 | GGGCTACCTTCTCTTTCAG |
| siRNA 689 | 689 | TGAAAGAGAAGGTAGCCCA | 2431 | TGGGCTACCTTCTCTTTCA |
| siRNA 690 | 690 | GAAAGAGAAGGTAGCCCAG | 2432 | CTGGGCTACCTTCTCTTTC |
| siRNA 691 | 691 | AAAGAGAAGGTAGCCCAGC | 2433 | GCTGGGCTACCTTCTCTTT |
| siRNA 692 | 692 | AAGAGAAGGTAGCCCAGCT | 2434 | AGCTGGGCTACCTTCTCTT |
| siRNA 693 | 693 | AGAGAAGGTAGCCCAGCTT | 2435 | AAGCTGGGCTACCTTCTCT |
| siRNA 694 | 694 | GAGAAGGTAGCCCAGCTTG | 2436 | CAAGCTGGGCTACCTTCTC |
| siRNA 695 | 695 | AGAAGGTAGCCCAGCTTGA | 2437 | TCAAGCTGGGCTACCTTCT |
| siRNA 696 | 696 | GAAGGTAGCCCAGCTTGAA | 2438 | TTCAAGCTGGGCTACCTTC |
| siRNA 697 | 697 | AAGGTAGCCCAGCTTGAAG | 2439 | CTTCAAGCTGGGCTACCTT |
| siRNA 698 | 698 | AGGTAGCCCAGCTTGAAGC | 2440 | GCTTCAAGCTGGGCTACCT |
| siRNA 699 | 699 | GGTAGCCCAGCTTGAAGCA | 2441 | TGCTTCAAGCTGGGCTACC |
| siRNA 700 | 700 | GTAGCCCAGCTTGAAGCAC | 2442 | GTGCTTCAAGCTGGGCTAC |
| siRNA 701 | 701 | TAGCCCAGCTTGAAGCACA | 2443 | TGTGCTTCAAGCTGGGCTA |
| siRNA 702 | 702 | AGCCCAGCTTGAAGCACAG | 2444 | CTGTGCTTCAAGCTGGGCT |
| siRNA 703 | 703 | GCCCAGCTTGAAGCACAGT | 2445 | ACTGTGCTTCAAGCTGGGC |
| siRNA 704 | 704 | CCCAGCTTGAAGCACAGTG | 2446 | CACTGTGCTTCAAGCTGGG |
| siRNA 705 | 705 | CCAGCTTGAAGCACAGTGC | 2447 | GCACTGTGCTTCAAGCTGG |
| siRNA 706 | 706 | CAGCTTGAAGCACAGTGCC | 2448 | GGCACTGTGCTTCAAGCTG |
| siRNA 707 | 707 | AGCTTGAAGCACAGTGCCA | 2449 | TGGCACTGTGCTTCAAGCT |
| siRNA 708 | 708 | GCTTGAAGCACAGTGCCAG | 2450 | CTGGCACTGTGCTTCAAGC |
| siRNA 709 | 709 | CTTGAAGCACAGTGCCAGG | 2451 | CCTGGCACTGTGCTTCAAG |
| siRNA 710 | 710 | TTGAAGCACAGTGCCAGGA | 2452 | TCCTGGCACTGTGCTTCAA |
| siRNA 711 | 711 | TGAAGCACAGTGCCAGGAA | 2453 | TTCCTGGCACTGTGCTTCA |
| siRNA 712 | 712 | GAAGCACAGTGCCAGGAAC | 2454 | GTTCCTGGCACTGTGCTTC |
| siRNA 713 | 713 | AAGCACAGTGCCAGGAACC | 2455 | GGTTCCTGGCACTGTGCTT |
| siRNA 714 | 714 | AGCACAGTGCCAGGAACCT | 2456 | AGGTTCCTGGCACTGTGCT |
| siRNA 715 | 715 | GCACAGTGCCAGGAACCTT | 2457 | AAGGTTCCTGGCACTGTGC |
| siRNA 716 | 716 | CACAGTGCCAGGAACCTTG | 2458 | CAAGGTTCCTGGCACTGTG |
| siRNA 717 | 717 | ACAGTGCCAGGAACCTTGC | 2459 | GCAAGGTTCCTGGCACTGT |
| siRNA 718 | 718 | CAGTGCCAGGAACCTTGCA | 2460 | TGCAAGGTTCCTGGCACTG |
| siRNA 719 | 719 | AGTGCCAGGAACCTTGCAA | 2461 | TTGCAAGGTTCCTGGCACT |
| siRNA 720 | 720 | GTGCCAGGAACCTTGCAAA | 2462 | TTTGCAAGGTTCCTGGCAC |
| siRNA 721 | 721 | TGCCAGGAACCTTGCAAAG | 2463 | CTTTGCAAGGTTCCTGGCA |
| siRNA 722 | 722 | GCCAGGAACCTTGCAAAGA | 2464 | TCTTTGCAAGGTTCCTGGC |
| siRNA 723 | 723 | CCAGGAACCTTGCAAAGAC | 2465 | GTCTTTGCAAGGTTCCTGG |
| siRNA 724 | 724 | CAGGAACCTTGCAAAGACA | 2466 | TGTCTTTGCAAGGTTCCTG |
| siRNA 725 | 725 | AGGAACCTTGCAAAGACAC | 2467 | GTGTCTTTGCAAGGTTCCT |
| siRNA 726 | 726 | GGAACCTTGCAAAGACACG | 2468 | CGTGTCTTTGCAAGGTTCC |
| siRNA 727 | 727 | GAACCTTGCAAAGACACGG | 2469 | CCGTGTCTTTGCAAGGTTC |
| siRNA 728 | 728 | AACCTTGCAAAGACACGGT | 2470 | ACCGTGTCTTTGCAAGGTT |
| siRNA 729 | 729 | ACCTTGCAAAGACACGGTG | 2471 | CACCGTGTCTTTGCAAGGT |
| siRNA 730 | 730 | CCTTGCAAAGACACGGTGC | 2472 | GCACCGTGTCTTTGCAAGG |
| siRNA 731 | 731 | CTTGCAAAGACACGGTGCA | 2473 | TGCACCGTGTCTTTGCAAG |
| siRNA 732 | 732 | TTGCAAAGACACGGTGCAA | 2474 | TTGCACCGTGTCTTTGCAA |
| siRNA 733 | 733 | TGCAAAGACACGGTGCAAA | 2475 | TTTGCACCGTGTCTTTGCA |
| siRNA 734 | 734 | GCAAAGACACGGTGCAAAT | 2476 | ATTTGCACCGTGTCTTTGC |
| siRNA 735 | 735 | CAAAGACACGGTGCAAATC | 2477 | GATTTGCACCGTGTCTTTG |
| siRNA 736 | 736 | AAAGACACGGTGCAAATCC | 2478 | GGATTTGCACCGTGTCTTT |
| siRNA 737 | 737 | AAGACACGGTGCAAATCCA | 2479 | TGGATTTGCACCGTGTCTT |
| siRNA 738 | 738 | AGACACGGTGCAAATCCAT | 2480 | ATGGATTTGCACCGTGTCT |
| siRNA 739 | 739 | GACACGGTGCAAATCCATG | 2481 | CATGGATTTGCACCGTGTC |
| siRNA 740 | 740 | ACACGGTGCAAATCCATGA | 2482 | TCATGGATTTGCACCGTGT |
| siRNA 741 | 741 | CACGGTGCAAATCCATGAT | 2483 | ATCATGGATTTGCACCGTG |
| siRNA 742 | 742 | ACGGTGCAAATCCATGATA | 2484 | TATCATGGATTTGCACCGT |
| siRNA 743 | 743 | CGGTGCAAATCCATGATAT | 2485 | ATATCATGGATTTGCACCG |
| siRNA 744 | 744 | GGTGCAAATCCATGATATC | 2486 | GATATCATGGATTTGCACC |
| siRNA 745 | 745 | GTGCAAATCCATGATATCA | 2487 | TGATATCATGGATTTGCAC |
| siRNA 746 | 746 | TGCAAATCCATGATATCAC | 2488 | GTGATATCATGGATTTGCA |
| siRNA 747 | 747 | GCAAATCCATGATATCACT | 2489 | AGTGATATCATGGATTTGC |
| siRNA 748 | 748 | CAAATCCATGATATCACTG | 2490 | CAGTGATATCATGGATTTG |
| siRNA 749 | 749 | AAATCCATGATATCACTGG | 2491 | CCAGTGATATCATGGATTT |
| siRNA 750 | 750 | AATCCATGATATCACTGGG | 2492 | CCCAGTGATATCATGGATT |
| siRNA 751 | 751 | ATCCATGATATCACTGGGA | 2493 | TCCCAGTGATATCATGGAT |
| siRNA 752 | 752 | TCCATGATATCACTGGGAA | 2494 | TTCCCAGTGATATCATGGA |
| siRNA 753 | 753 | CCATGATATCACTGGGAAA | 2495 | TTTCCCAGTGATATCATGG |
| siRNA 754 | 754 | CATGATATCACTGGGAAAG | 2496 | CTTTCCCAGTGATATCATG |
| siRNA 755 | 755 | ATGATATCACTGGGAAAGA | 2497 | TCTTTCCCAGTGATATCAT |
| siRNA 756 | 756 | TGATATCACTGGGAAAGAT | 2498 | ATCTTTCCCAGTGATATCA |
| siRNA 757 | 757 | GATATCACTGGGAAAGATT | 2499 | AATCTTTCCCAGTGATATC |
| siRNA 758 | 758 | ATATCACTGGGAAAGATTG | 2500 | CAATCTTTCCCAGTGATAT |
| siRNA 759 | 759 | TATCACTGGGAAAGATTGT | 2501 | ACAATCTTTCCCAGTGATA |
| siRNA 760 | 760 | ATCACTGGGAAAGATTGTC | 2502 | GACAATCTTTCCCAGTGAT |
| siRNA 761 | 761 | TCACTGGGAAAGATTGTCA | 2503 | TGACAATCTTTCCCAGTGA |
| siRNA 762 | 762 | CACTGGGAAAGATTGTCAA | 2504 | TTGACAATCTTTCCCAGTG |
| siRNA 763 | 763 | ACTGGGAAAGATTGTCAAG | 2505 | CTTGACAATCTTTCCCAGT |
| siRNA 764 | 764 | CTGGGAAAGATTGTCAAGA | 2506 | TCTTGACAATCTTTCCCAG |
| siRNA 765 | 765 | TGGGAAAGATTGTCAAGAC | 2507 | GTCTTGACAATCTTTCCCA |
| siRNA 766 | 766 | GGGAAAGATTGTCAAGACA | 2508 | TGTCTTGACAATCTTTCCC |
| siRNA 767 | 767 | GGAAAGATTGTCAAGACAT | 2509 | ATGTCTTGACAATCTTTCC |
| siRNA 768 | 768 | GAAAGATTGTCAAGACATT | 2510 | AATGTCTTGACAATCTTTC |
| siRNA 769 | 769 | AAAGATTGTCAAGACATTG | 2511 | CAATGTCTTGACAATCTTT |
| siRNA 770 | 770 | AAGATTGTCAAGACATTGC | 2512 | GCAATGTCTTGACAATCTT |
| siRNA 771 | 771 | AGATTGTCAAGACATTGCC | 2513 | GGCAATGTCTTGACAATCT |
| siRNA 772 | 772 | GATTGTCAAGACATTGCCA | 2514 | TGGCAATGTCTTGACAATC |
| siRNA 773 | 773 | ATTGTCAAGACATTGCCAA | 2515 | TTGGCAATGTCTTGACAAT |
| siRNA 774 | 774 | TTGTCAAGACATTGCCAAT | 2516 | ATTGGCAATGTCTTGACAA |
| siRNA 775 | 775 | TGTCAAGACATTGCCAATA | 2517 | TATTGGCAATGTCTTGACA |
| siRNA 776 | 776 | GTCAAGACATTGCCAATAA | 2518 | TTATTGGCAATGTCTTGAC |
| siRNA 777 | 777 | TCAAGACATTGCCAATAAG | 2519 | CTTATTGGCAATGTCTTGA |
| siRNA 778 | 778 | CAAGACATTGCCAATAAGG | 2520 | CCTTATTGGCAATGTCTTG |
| siRNA 779 | 779 | AAGACATTGCCAATAAGGG | 2521 | CCCTTATTGGCAATGTCTT |
| siRNA 780 | 780 | AGACATTGCCAATAAGGGA | 2522 | TCCCTTATTGGCAATGTCT |
| siRNA 781 | 781 | GACATTGCCAATAAGGGAG | 2523 | CTCCCTTATTGGCAATGTC |
| siRNA 782 | 782 | ACATTGCCAATAAGGGAGC | 2524 | GCTCCCTTATTGGCAATGT |
| siRNA 783 | 783 | CATTGCCAATAAGGGAGCT | 2525 | AGCTCCCTTATTGGCAATG |
| siRNA 784 | 784 | ATTGCCAATAAGGGAGCTA | 2526 | TAGCTCCCTTATTGGCAAT |
| siRNA 785 | 785 | TTGCCAATAAGGGAGCTAA | 2527 | TTAGCTCCCTTATTGGCAA |
| siRNA 786 | 786 | TGCCAATAAGGGAGCTAAA | 2528 | TTTAGCTCCCTTATTGGCA |
| siRNA 787 | 787 | GCCAATAAGGGAGCTAAAC | 2529 | GTTTAGCTCCCTTATTGGC |
| siRNA 788 | 788 | CCAATAAGGGAGCTAAACA | 2530 | TGTTTAGCTCCCTTATTGG |
| siRNA 789 | 789 | CAATAAGGGAGCTAAACAG | 2531 | CTGTTTAGCTCCCTTATTG |
| siRNA 790 | 790 | AATAAGGGAGCTAAACAGA | 2532 | TCTGTTTAGCTCCCTTATT |
| siRNA 791 | 791 | ATAAGGGAGCTAAACAGAG | 2533 | CTCTGTTTAGCTCCCTTAT |
| siRNA 792 | 792 | TAAGGGAGCTAAACAGAGC | 2534 | GCTCTGTTTAGCTCCCTTA |
| siRNA 793 | 793 | AAGGGAGCTAAACAGAGCG | 2535 | CGCTCTGTTTAGCTCCCTT |
| siRNA 794 | 794 | AGGGAGCTAAACAGAGCGG | 2536 | CCGCTCTGTTTAGCTCCCT |
| siRNA 795 | 795 | GGGAGCTAAACAGAGCGGG | 2537 | CCCGCTCTGTTTAGCTCCC |
| siRNA 796 | 796 | GGAGCTAAACAGAGCGGGC | 2538 | GCCCGCTCTGTTTAGCTCC |
| siRNA 797 | 797 | GAGCTAAACAGAGCGGGCT | 2539 | AGCCCGCTCTGTTTAGCTC |
| siRNA 798 | 798 | AGCTAAACAGAGCGGGCTT | 2540 | AAGCCCGCTCTGTTTAGCT |
| siRNA 799 | 799 | GCTAAACAGAGCGGGCTTT | 2541 | AAAGCCCGCTCTGTTTAGC |
| siRNA 800 | 800 | CTAAACAGAGCGGGCTTTA | 2542 | TAAAGCCCGCTCTGTTTAG |
| siRNA 801 | 801 | TAAACAGAGCGGGCTTTAC | 2543 | GTAAAGCCCGCTCTGTTTA |
| siRNA 802 | 802 | AAACAGAGCGGGCTTTACT | 2544 | AGTAAAGCCCGCTCTGTTT |
| siRNA 803 | 803 | AACAGAGCGGGCTTTACTT | 2545 | AAGTAAAGCCCGCTCTGTT |
| siRNA 804 | 804 | ACAGAGCGGGCTTTACTTT | 2546 | AAAGTAAAGCCCGCTCTGT |
| siRNA 805 | 805 | CAGAGCGGGCTTTACTTTA | 2547 | TAAAGTAAAGCCCGCTCTG |
| siRNA 806 | 806 | AGAGCGGGCTTTACTTTAT | 2548 | ATAAAGTAAAGCCCGCTCT |
| siRNA 807 | 807 | GAGCGGGCTTTACTTTATT | 2549 | AATAAAGTAAAGCCCGCTC |
| siRNA 808 | 808 | AGCGGGCTTTACTTTATTA | 2550 | TAATAAAGTAAAGCCCGCT |
| siRNA 809 | 809 | GCGGGCTTTACTTTATTAA | 2551 | TTAATAAAGTAAAGCCCGC |
| siRNA 810 | 810 | CGGGCTTTACTTTATTAAA | 2552 | TTTAATAAAGTAAAGCCCG |
| siRNA 811 | 811 | GGGCTTTACTTTATTAAAC | 2553 | GTTTAATAAAGTAAAGCCC |
| siRNA 812 | 812 | GGCTTTACTTTATTAAACC | 2554 | GGTTTAATAAAGTAAAGCC |
| siRNA 813 | 813 | GCTTTACTTTATTAAACCT | 2555 | AGGTTTAATAAAGTAAAGC |
| siRNA 814 | 814 | CTTTACTTTATTAAACCTC | 2556 | GAGGTTTAATAAAGTAAAG |
| siRNA 815 | 815 | TTTACTTTATTAAACCTCT | 2557 | AGAGGTTTAATAAAGTAAA |
| siRNA 816 | 816 | TTACTTTATTAAACCTCTG | 2558 | CAGAGGTTTAATAAAGTAA |
| siRNA 817 | 817 | TACTTTATTAAACCTCTGA | 2559 | TCAGAGGTTTAATAAAGTA |
| siRNA 818 | 818 | ACTTTATTAAACCTCTGAA | 2560 | TTCAGAGGTTTAATAAAGT |
| siRNA 819 | 819 | CTTTATTAAACCTCTGAAA | 2561 | TTTCAGAGGTTTAATAAAG |
| siRNA 820 | 820 | TTTATTAAACCTCTGAAAG | 2562 | CTTTCAGAGGTTTAATAAA |
| siRNA 821 | 821 | TTATTAAACCTCTGAAAGC | 2563 | GCTTTCAGAGGTTTAATAA |
| siRNA 822 | 822 | TATTAAACCTCTGAAAGCT | 2564 | AGCTTTCAGAGGTTTAATA |
| siRNA 823 | 823 | ATTAAACCTCTGAAAGCTA | 2565 | TAGCTTTCAGAGGTTTAAT |
| siRNA 824 | 824 | TTAAACCTCTGAAAGCTAA | 2566 | TTAGCTTTCAGAGGTTTAA |
| siRNA 825 | 825 | TAAACCTCTGAAAGCTAAC | 2567 | GTTAGCTTTCAGAGGTTTA |
| siRNA 826 | 826 | AAACCTCTGAAAGCTAACC | 2568 | GGTTAGCTTTCAGAGGTTT |
| siRNA 827 | 827 | AACCTCTGAAAGCTAACCA | 2569 | TGGTTAGCTTTCAGAGGTT |
| siRNA 828 | 828 | ACCTCTGAAAGCTAACCAG | 2570 | CTGGTTAGCTTTCAGAGGT |
| siRNA 829 | 829 | CCTCTGAAAGCTAACCAGC | 2571 | GCTGGTTAGCTTTCAGAGG |
| siRNA 830 | 830 | CTCTGAAAGCTAACCAGCA | 2572 | TGCTGGTTAGCTTTCAGAG |
| siRNA 831 | 831 | TCTGAAAGCTAACCAGCAA | 2573 | TTGCTGGTTAGCTTTCAGA |
| siRNA 832 | 832 | CTGAAAGCTAACCAGCAAT | 2574 | ATTGCTGGTTAGCTTTCAG |
| siRNA 833 | 833 | TGAAAGCTAACCAGCAATT | 2575 | AATTGCTGGTTAGCTTTCA |
| siRNA 834 | 834 | GAAAGCTAACCAGCAATTC | 2576 | GAATTGCTGGTTAGCTTTC |
| siRNA 835 | 835 | AAAGCTAACCAGCAATTCT | 2577 | AGAATTGCTGGTTAGCTTT |
| siRNA 836 | 836 | AAGCTAACCAGCAATTCTT | 2578 | AAGAATTGCTGGTTAGCTT |
| siRNA 837 | 837 | AGCTAACCAGCAATTCTTA | 2579 | TAAGAATTGCTGGTTAGCT |
| siRNA 838 | 838 | GCTAACCAGCAATTCTTAG | 2580 | CTAAGAATTGCTGGTTAGC |
| siRNA 839 | 839 | CTAACCAGCAATTCTTAGT | 2581 | ACTAAGAATTGCTGGTTAG |
| siRNA 840 | 840 | TAACCAGCAATTCTTAGTC | 2582 | GACTAAGAATTGCTGGTTA |
| siRNA 841 | 841 | AACCAGCAATTCTTAGTCT | 2583 | AGACTAAGAATTGCTGGTT |
| siRNA 842 | 842 | ACCAGCAATTCTTAGTCTA | 2584 | TAGACTAAGAATTGCTGGT |
| siRNA 843 | 843 | CCAGCAATTCTTAGTCTAC | 2585 | GTAGACTAAGAATTGCTGG |
| siRNA 844 | 844 | CAGCAATTCTTAGTCTACT | 2586 | AGTAGACTAAGAATTGCTG |
| siRNA 845 | 845 | AGCAATTCTTAGTCTACTG | 2587 | CAGTAGACTAAGAATTGCT |
| siRNA 846 | 846 | GCAATTCTTAGTCTACTGT | 2588 | ACAGTAGACTAAGAATTGC |
| siRNA 847 | 847 | CAATTCTTAGTCTACTGTG | 2589 | CACAGTAGACTAAGAATTG |
| siRNA 848 | 848 | AATTCTTAGTCTACTGTGA | 2590 | TCACAGTAGACTAAGAATT |
| siRNA 849 | 849 | ATTCTTAGTCTACTGTGAA | 2591 | TTCACAGTAGACTAAGAAT |
| siRNA 850 | 850 | TTCTTAGTCTACTGTGAAA | 2592 | TTTCACAGTAGACTAAGAA |
| siRNA 851 | 851 | TCTTAGTCTACTGTGAAAT | 2593 | ATTTCACAGTAGACTAAGA |
| siRNA 852 | 852 | CTTAGTCTACTGTGAAATC | 2594 | GATTTCACAGTAGACTAAG |
| siRNA 853 | 853 | TTAGTCTACTGTGAAATCG | 2595 | CGATTTCACAGTAGACTAA |
| siRNA 854 | 854 | TAGTCTACTGTGAAATCGA | 2596 | TCGATTTCACAGTAGACTA |
| siRNA 855 | 855 | AGTCTACTGTGAAATCGAT | 2597 | ATCGATTTCACAGTAGACT |
| siRNA 856 | 856 | GTCTACTGTGAAATCGATG | 2598 | CATCGATTTCACAGTAGAC |
| siRNA 857 | 857 | TCTACTGTGAAATCGATGG | 2599 | CCATCGATTTCACAGTAGA |
| siRNA 858 | 858 | CTACTGTGAAATCGATGGG | 2600 | CCCATCGATTTCACAGTAG |
| siRNA 859 | 859 | TACTGTGAAATCGATGGGT | 2601 | ACCCATCGATTTCACAGTA |
| siRNA 860 | 860 | ACTGTGAAATCGATGGGTC | 2602 | GACCCATCGATTTCACAGT |
| siRNA 861 | 861 | CTGTGAAATCGATGGGTCT | 2603 | AGACCCATCGATTTCACAG |
| siRNA 862 | 862 | TGTGAAATCGATGGGTCTG | 2604 | CAGACCCATCGATTTCACA |
| siRNA 863 | 863 | GTGAAATCGATGGGTCTGG | 2605 | CCAGACCCATCGATTTCAC |
| siRNA 864 | 864 | TGAAATCGATGGGTCTGGA | 2606 | TCCAGACCCATCGATTTCA |
| siRNA 865 | 865 | GAAATCGATGGGTCTGGAA | 2607 | TTCCAGACCCATCGATTTC |
| siRNA 866 | 866 | AAATCGATGGGTCTGGAAA | 2608 | TTTCCAGACCCATCGATTT |
| siRNA 867 | 867 | AATCGATGGGTCTGGAAAT | 2609 | ATTTCCAGACCCATCGATT |
| siRNA 868 | 868 | ATCGATGGGTCTGGAAATG | 2610 | CATTTCCAGACCCATCGAT |
| siRNA 869 | 869 | TCGATGGGTCTGGAAATGG | 2611 | CCATTTCCAGACCCATCGA |
| siRNA 870 | 870 | CGATGGGTCTGGAAATGGA | 2612 | TCCATTTCCAGACCCATCG |
| siRNA 871 | 871 | GATGGGTCTGGAAATGGAT | 2613 | ATCCATTTCCAGACCCATC |
| siRNA 872 | 872 | ATGGGTCTGGAAATGGATG | 2614 | CATCCATTTCCAGACCCAT |
| siRNA 873 | 873 | TGGGTCTGGAAATGGATGG | 2615 | CCATCCATTTCCAGACCCA |
| siRNA 874 | 874 | GGGTCTGGAAATGGATGGA | 2616 | TCCATCCATTTCCAGACCC |
| siRNA 875 | 875 | GGTCTGGAAATGGATGGAC | 2617 | GTCCATCCATTTCCAGACC |
| siRNA 876 | 876 | GTCTGGAAATGGATGGACT | 2618 | AGTCCATCCATTTCCAGAC |
| siRNA 877 | 877 | TCTGGAAATGGATGGACTG | 2619 | CAGTCCATCCATTTCCAGA |
| siRNA 878 | 878 | CTGGAAATGGATGGACTGT | 2620 | ACAGTCCATCCATTTCCAG |
| siRNA 879 | 879 | TGGAAATGGATGGACTGTG | 2621 | CACAGTCCATCCATTTCCA |
| siRNA 880 | 880 | GGAAATGGATGGACTGTGT | 2622 | ACACAGTCCATCCATTTCC |
| siRNA 881 | 881 | GAAATGGATGGACTGTGTT | 2623 | AACACAGTCCATCCATTTC |
| siRNA 882 | 882 | AAATGGATGGACTGTGTTT | 2624 | AAACACAGTCCATCCATTT |
| siRNA 883 | 883 | AATGGATGGACTGTGTTTC | 2625 | GAAACACAGTCCATCCATT |
| siRNA 884 | 884 | ATGGATGGACTGTGTTTCA | 2626 | TGAAACACAGTCCATCCAT |
| siRNA 885 | 885 | TGGATGGACTGTGTTTCAG | 2627 | CTGAAACACAGTCCATCCA |
| siRNA 886 | 886 | GGATGGACTGTGTTTCAGA | 2628 | TCTGAAACACAGTCCATCC |
| siRNA 887 | 887 | GATGGACTGTGTTTCAGAA | 2629 | TTCTGAAACACAGTCCATC |
| siRNA 888 | 888 | ATGGACTGTGTTTCAGAAG | 2630 | CTTCTGAAACACAGTCCAT |
| siRNA 889 | 889 | TGGACTGTGTTTCAGAAGA | 2631 | TCTTCTGAAACACAGTCCA |
| siRNA 890 | 890 | GGACTGTGTTTCAGAAGAG | 2632 | CTCTTCTGAAACACAGTCC |
| siRNA 891 | 891 | GACTGTGTTTCAGAAGAGA | 2633 | TCTCTTCTGAAACACAGTC |
| siRNA 892 | 892 | ACTGTGTTTCAGAAGAGAC | 2634 | GTCTCTTCTGAAACACAGT |
| siRNA 893 | 893 | CTGTGTTTCAGAAGAGACT | 2635 | AGTCTCTTCTGAAACACAG |
| siRNA 894 | 894 | TGTGTTTCAGAAGAGACTT | 2636 | AAGTCTCTTCTGAAACACA |
| siRNA 895 | 895 | GTGTTTCAGAAGAGACTTG | 2637 | CAAGTCTCTTCTGAAACAC |
| siRNA 896 | 896 | TGTTTCAGAAGAGACTTGA | 2638 | TCAAGTCTCTTCTGAAACA |
| siRNA 897 | 897 | GTTTCAGAAGAGACTTGAT | 2639 | ATCAAGTCTCTTCTGAAAC |
| siRNA 898 | 898 | TTTCAGAAGAGACTTGATG | 2640 | CATCAAGTCTCTTCTGAAA |
| siRNA 899 | 899 | TTCAGAAGAGACTTGATGG | 2641 | CCATCAAGTCTCTTCTGAA |
| siRNA 900 | 900 | TCAGAAGAGACTTGATGGC | 2642 | GCCATCAAGTCTCTTCTGA |
| siRNA 901 | 901 | CAGAAGAGACTTGATGGCA | 2643 | TGCCATCAAGTCTCTTCTG |
| siRNA 902 | 902 | AGAAGAGACTTGATGGCAG | 2644 | CTGCCATCAAGTCTCTTCT |
| siRNA 903 | 903 | GAAGAGACTTGATGGCAGT | 2645 | ACTGCCATCAAGTCTCTTC |
| siRNA 904 | 904 | AAGAGACTTGATGGCAGTG | 2646 | CACTGCCATCAAGTCTCTT |
| siRNA 905 | 905 | AGAGACTTGATGGCAGTGT | 2647 | ACACTGCCATCAAGTCTCT |
| siRNA 906 | 906 | GAGACTTGATGGCAGTGTA | 2648 | TACACTGCCATCAAGTCTC |
| siRNA 907 | 907 | AGACTTGATGGCAGTGTAG | 2649 | CTACACTGCCATCAAGTCT |
| siRNA 908 | 908 | GACTTGATGGCAGTGTAGA | 2650 | TCTACACTGCCATCAAGTC |
| siRNA 909 | 909 | ACTTGATGGCAGTGTAGAT | 2651 | ATCTACACTGCCATCAAGT |
| siRNA 910 | 910 | CTTGATGGCAGTGTAGATT | 2652 | AATCTACACTGCCATCAAG |
| siRNA 911 | 911 | TTGATGGCAGTGTAGATTT | 2653 | AAATCTACACTGCCATCAA |
| siRNA 912 | 912 | TGATGGCAGTGTAGATTTC | 2654 | GAAATCTACACTGCCATCA |
| siRNA 913 | 913 | GATGGCAGTGTAGATTTCA | 2655 | TGAAATCTACACTGCCATC |
| siRNA 914 | 914 | ATGGCAGTGTAGATTTCAA | 2656 | TTGAAATCTACACTGCCAT |
| siRNA 915 | 915 | TGGCAGTGTAGATTTCAAG | 2657 | CTTGAAATCTACACTGCCA |
| siRNA 916 | 916 | GGCAGTGTAGATTTCAAGA | 2658 | TCTTGAAATCTACACTGCC |
| siRNA 917 | 917 | GCAGTGTAGATTTCAAGAA | 2659 | TTCTTGAAATCTACACTGC |
| siRNA 918 | 918 | CAGTGTAGATTTCAAGAAA | 2660 | TTTCTTGAAATCTACACTG |
| siRNA 919 | 919 | AGTGTAGATTTCAAGAAAA | 2661 | TTTTCTTGAAATCTACACT |
| siRNA 920 | 920 | GTGTAGATTTCAAGAAAAA | 2662 | TTTTTCTTGAAATCTACAC |
| siRNA 921 | 921 | TGTAGATTTCAAGAAAAAC | 2663 | GTTTTTCTTGAAATCTACA |
| siRNA 922 | 922 | GTAGATTTCAAGAAAAACT | 2664 | AGTTTTTCTTGAAATCTAC |
| siRNA 923 | 923 | TAGATTTCAAGAAAAACTG | 2665 | CAGTTTTTCTTGAAATCTA |
| siRNA 924 | 924 | AGATTTCAAGAAAAACTGG | 2666 | CCAGTTTTTCTTGAAATCT |
| siRNA 925 | 925 | GATTTCAAGAAAAACTGGA | 2667 | TCCAGTTTTTCTTGAAATC |
| siRNA 926 | 926 | ATTTCAAGAAAAACTGGAT | 2668 | ATCCAGTTTTTCTTGAAAT |
| siRNA 927 | 927 | TTTCAAGAAAAACTGGATT | 2669 | AATCCAGTTTTTCTTGAAA |
| siRNA 928 | 928 | TTCAAGAAAAACTGGATTC | 2670 | GAATCCAGTTTTTCTTGAA |
| siRNA 929 | 929 | TCAAGAAAAACTGGATTCA | 2671 | TGAATCCAGTTTTTCTTGA |
| siRNA 930 | 930 | CAAGAAAAACTGGATTCAA | 2672 | TTGAATCCAGTTTTTCTTG |
| siRNA 931 | 931 | AAGAAAAACTGGATTCAAT | 2673 | ATTGAATCCAGTTTTTCTT |
| siRNA 932 | 932 | AGAAAAACTGGATTCAATA | 2674 | TATTGAATCCAGTTTTTCT |
| siRNA 933 | 933 | GAAAAACTGGATTCAATAT | 2675 | ATATTGAATCCAGTTTTTC |
| siRNA 934 | 934 | AAAAACTGGATTCAATATA | 2676 | TATATTGAATCCAGTTTTT |
| siRNA 935 | 935 | AAAACTGGATTCAATATAA | 2677 | TTATATTGAATCCAGTTTT |
| siRNA 936 | 936 | AAACTGGATTCAATATAAA | 2678 | TTTATATTGAATCCAGTTT |
| siRNA 937 | 937 | AACTGGATTCAATATAAAG | 2679 | CTTTATATTGAATCCAGTT |
| siRNA 938 | 938 | ACTGGATTCAATATAAAGA | 2680 | TCTTTATATTGAATCCAGT |
| siRNA 939 | 939 | CTGGATTCAATATAAAGAA | 2681 | TTCTTTATATTGAATCCAG |
| siRNA 940 | 940 | TGGATTCAATATAAAGAAG | 2682 | CTTCTTTATATTGAATCCA |
| siRNA 941 | 941 | GGATTCAATATAAAGAAGG | 2683 | CCTTCTTTATATTGAATCC |
| siRNA 942 | 942 | GATTCAATATAAAGAAGGA | 2684 | TCCTTCTTTATATTGAATC |
| siRNA 943 | 943 | ATTCAATATAAAGAAGGAT | 2685 | ATCCTTCTTTATATTGAAT |
| siRNA 944 | 944 | TTCAATATAAAGAAGGATT | 2686 | AATCCTTCTTTATATTGAA |
| siRNA 945 | 945 | TCAATATAAAGAAGGATTT | 2687 | AAATCCTTCTTTATATTGA |
| siRNA 946 | 946 | CAATATAAAGAAGGATTTG | 2688 | CAAATCCTTCTTTATATTG |
| siRNA 947 | 947 | AATATAAAGAAGGATTTGG | 2689 | CCAAATCCTTCTTTATATT |
| siRNA 948 | 948 | ATATAAAGAAGGATTTGGA | 2690 | TCCAAATCCTTCTTTATAT |
| siRNA 949 | 949 | TATAAAGAAGGATTTGGAC | 2691 | GTCCAAATCCTTCTTTATA |
| siRNA 950 | 950 | ATAAAGAAGGATTTGGACA | 2692 | TGTCCAAATCCTTCTTTAT |
| siRNA 951 | 951 | TAAAGAAGGATTTGGACAT | 2693 | ATGTCCAAATCCTTCTTTA |
| siRNA 952 | 952 | AAAGAAGGATTTGGACATC | 2694 | GATGTCCAAATCCTTCTTT |
| siRNA 953 | 953 | AAGAAGGATTTGGACATCT | 2695 | AGATGTCCAAATCCTTCTT |
| siRNA 954 | 954 | AGAAGGATTTGGACATCTG | 2696 | CAGATGTCCAAATCCTTCT |
| siRNA 955 | 955 | GAAGGATTTGGACATCTGT | 2697 | ACAGATGTCCAAATCCTTC |
| siRNA 956 | 956 | AAGGATTTGGACATCTGTC | 2698 | GACAGATGTCCAAATCCTT |
| siRNA 957 | 957 | AGGATTTGGACATCTGTCT | 2699 | AGACAGATGTCCAAATCCT |
| siRNA 958 | 958 | GGATTTGGACATCTGTCTC | 2700 | GAGACAGATGTCCAAATCC |
| siRNA 959 | 959 | GATTTGGACATCTGTCTCC | 2701 | GGAGACAGATGTCCAAATC |
| siRNA 960 | 960 | ATTTGGACATCTGTCTCCT | 2702 | AGGAGACAGATGTCCAAAT |
| siRNA 961 | 961 | TTTGGACATCTGTCTCCTA | 2703 | TAGGAGACAGATGTCCAAA |
| siRNA 962 | 962 | TTGGACATCTGTCTCCTAC | 2704 | GTAGGAGACAGATGTCCAA |
| siRNA 963 | 963 | TGGACATCTGTCTCCTACT | 2705 | AGTAGGAGACAGATGTCCA |
| siRNA 964 | 964 | GGACATCTGTCTCCTACTG | 2706 | CAGTAGGAGACAGATGTCC |
| siRNA 965 | 965 | GACATCTGTCTCCTACTGG | 2707 | CCAGTAGGAGACAGATGTC |
| siRNA 966 | 966 | ACATCTGTCTCCTACTGGC | 2708 | GCCAGTAGGAGACAGATGT |
| siRNA 967 | 967 | CATCTGTCTCCTACTGGCA | 2709 | TGCCAGTAGGAGACAGATG |
| siRNA 968 | 968 | ATCTGTCTCCTACTGGCAC | 2710 | GTGCCAGTAGGAGACAGAT |
| siRNA 969 | 969 | TCTGTCTCCTACTGGCACA | 2711 | TGTGCCAGTAGGAGACAGA |
| siRNA 970 | 970 | CTGTCTCCTACTGGCACAA | 2712 | TTGTGCCAGTAGGAGACAG |
| siRNA 971 | 971 | TGTCTCCTACTGGCACAAC | 2713 | GTTGTGCCAGTAGGAGACA |
| siRNA 972 | 972 | GTCTCCTACTGGCACAACA | 2714 | TGTTGTGCCAGTAGGAGAC |
| siRNA 973 | 973 | TCTCCTACTGGCACAACAG | 2715 | CTGTTGTGCCAGTAGGAGA |
| siRNA 974 | 974 | CTCCTACTGGCACAACAGA | 2716 | TCTGTTGTGCCAGTAGGAG |
| siRNA 975 | 975 | TCCTACTGGCACAACAGAA | 2717 | TTCTGTTGTGCCAGTAGGA |
| siRNA 976 | 976 | CCTACTGGCACAACAGAAT | 2718 | ATTCTGTTGTGCCAGTAGG |
| siRNA 977 | 977 | CTACTGGCACAACAGAATT | 2719 | AATTCTGTTGTGCCAGTAG |
| siRNA 978 | 978 | TACTGGCACAACAGAATTT | 2720 | AAATTCTGTTGTGCCAGTA |
| siRNA 979 | 979 | ACTGGCACAACAGAATTTT | 2721 | AAAATTCTGTTGTGCCAGT |
| siRNA 980 | 980 | CTGGCACAACAGAATTTTG | 2722 | CAAAATTCTGTTGTGCCAG |
| siRNA 981 | 981 | TGGCACAACAGAATTTTGG | 2723 | CCAAAATTCTGTTGTGCCA |
| siRNA 982 | 982 | GGCACAACAGAATTTTGGC | 2724 | GCCAAAATTCTGTTGTGCC |
| siRNA 983 | 983 | GCACAACAGAATTTTGGCT | 2725 | AGCCAAAATTCTGTTGTGC |
| siRNA 984 | 984 | CACAACAGAATTTTGGCTG | 2726 | CAGCCAAAATTCTGTTGTG |
| siRNA 985 | 985 | ACAACAGAATTTTGGCTGG | 2727 | CCAGCCAAAATTCTGTTGT |
| siRNA 986 | 986 | CAACAGAATTTTGGCTGGG | 2728 | CCCAGCCAAAATTCTGTTG |
| siRNA 987 | 987 | AACAGAATTTTGGCTGGGA | 2729 | TCCCAGCCAAAATTCTGTT |
| siRNA 988 | 988 | ACAGAATTTTGGCTGGGAA | 2730 | TTCCCAGCCAAAATTCTGT |
| siRNA 989 | 989 | CAGAATTTTGGCTGGGAAA | 2731 | TTTCCCAGCCAAAATTCTG |
| siRNA 990 | 990 | AGAATTTTGGCTGGGAAAT | 2732 | ATTTCCCAGCCAAAATTCT |
| siRNA 991 | 991 | GAATTTTGGCTGGGAAATG | 2733 | CATTTCCCAGCCAAAATTC |
| siRNA 992 | 992 | AATTTTGGCTGGGAAATGA | 2734 | TCATTTCCCAGCCAAAATT |
| siRNA 993 | 993 | ATTTTGGCTGGGAAATGAG | 2735 | CTCATTTCCCAGCCAAAAT |
| siRNA 994 | 994 | TTTTGGCTGGGAAATGAGA | 2736 | TCTCATTTCCCAGCCAAAA |
| siRNA 995 | 995 | TTTGGCTGGGAAATGAGAA | 2737 | TTCTCATTTCCCAGCCAAA |
| siRNA 996 | 996 | TTGGCTGGGAAATGAGAAG | 2738 | CTTCTCATTTCCCAGCCAA |
| siRNA 997 | 997 | TGGCTGGGAAATGAGAAGA | 2739 | TCTTCTCATTTCCCAGCCA |
| siRNA 998 | 998 | GGCTGGGAAATGAGAAGAT | 2740 | ATCTTCTCATTTCCCAGCC |
| siRNA 999 | 999 | GCTGGGAAATGAGAAGATT | 2741 | AATCTTCTCATTTCCCAGC |
| siRNA 1000 | 1000 | CTGGGAAATGAGAAGATTC | 2742 | GAATCTTCTCATTTCCCAG |
| siRNA 1001 | 1001 | TGGGAAATGAGAAGATTCA | 2743 | TGAATCTTCTCATTTCCCA |
| siRNA 1002 | 1002 | GGGAAATGAGAAGATTCAT | 2744 | ATGAATCTTCTCATTTCCC |
| siRNA 1003 | 1003 | GGAAATGAGAAGATTCATT | 2745 | AATGAATCTTCTCATTTCC |
| siRNA 1004 | 1004 | GAAATGAGAAGATTCATTT | 2746 | AAATGAATCTTCTCATTTC |
| siRNA 1005 | 1005 | AAATGAGAAGATTCATTTG | 2747 | CAAATGAATCTTCTCATTT |
| siRNA 1006 | 1006 | AATGAGAAGATTCATTTGA | 2748 | TCAAATGAATCTTCTCATT |
| siRNA 1007 | 1007 | ATGAGAAGATTCATTTGAT | 2749 | ATCAAATGAATCTTCTCAT |
| siRNA 1008 | 1008 | TGAGAAGATTCATTTGATA | 2750 | TATCAAATGAATCTTCTCA |
| siRNA 1009 | 1009 | GAGAAGATTCATTTGATAA | 2751 | TTATCAAATGAATCTTCTC |
| siRNA 1010 | 1010 | AGAAGATTCATTTGATAAG | 2752 | CTTATCAAATGAATCTTCT |
| siRNA 1011 | 1011 | GAAGATTCATTTGATAAGC | 2753 | GCTTATCAAATGAATCTTC |
| siRNA 1012 | 1012 | AAGATTCATTTGATAAGCA | 2754 | TGCTTATCAAATGAATCTT |
| siRNA 1013 | 1013 | AGATTCATTTGATAAGCAC | 2755 | GTGCTTATCAAATGAATCT |
| siRNA 1014 | 1014 | GATTCATTTGATAAGCACA | 2756 | TGTGCTTATCAAATGAATC |
| siRNA 1015 | 1015 | ATTCATTTGATAAGCACAC | 2757 | GTGTGCTTATCAAATGAAT |
| siRNA 1016 | 1016 | TTCATTTGATAAGCACACA | 2758 | TGTGTGCTTATCAAATGAA |
| siRNA 1017 | 1017 | TCATTTGATAAGCACACAG | 2759 | CTGTGTGCTTATCAAATGA |
| siRNA 1018 | 1018 | CATTTGATAAGCACACAGT | 2760 | ACTGTGTGCTTATCAAATG |
| siRNA 1019 | 1019 | ATTTGATAAGCACACAGTC | 2761 | GACTGTGTGCTTATCAAAT |
| siRNA 1020 | 1020 | TTTGATAAGCACACAGTCT | 2762 | AGACTGTGTGCTTATCAAA |
| siRNA 1021 | 1021 | TTGATAAGCACACAGTCTG | 2763 | CAGACTGTGTGCTTATCAA |
| siRNA 1022 | 1022 | TGATAAGCACACAGTCTGC | 2764 | GCAGACTGTGTGCTTATCA |
| siRNA 1023 | 1023 | GATAAGCACACAGTCTGCC | 2765 | GGCAGACTGTGTGCTTATC |
| siRNA 1024 | 1024 | ATAAGCACACAGTCTGCCA | 2766 | TGGCAGACTGTGTGCTTAT |
| siRNA 1025 | 1025 | TAAGCACACAGTCTGCCAT | 2767 | ATGGCAGACTGTGTGCTTA |
| siRNA 1026 | 1026 | AAGCACACAGTCTGCCATC | 2768 | GATGGCAGACTGTGTGCTT |
| siRNA 1027 | 1027 | AGCACACAGTCTGCCATCC | 2769 | GGATGGCAGACTGTGTGCT |
| siRNA 1028 | 1028 | GCACACAGTCTGCCATCCC | 2770 | GGGATGGCAGACTGTGTGC |
| siRNA 1029 | 1029 | CACACAGTCTGCCATCCCA | 2771 | TGGGATGGCAGACTGTGTG |
| siRNA 1030 | 1030 | ACACAGTCTGCCATCCCAT | 2772 | ATGGGATGGCAGACTGTGT |
| siRNA 1031 | 1031 | CACAGTCTGCCATCCCATA | 2773 | TATGGGATGGCAGACTGTG |
| siRNA 1032 | 1032 | ACAGTCTGCCATCCCATAT | 2774 | ATATGGGATGGCAGACTGT |
| siRNA 1033 | 1033 | CAGTCTGCCATCCCATATG | 2775 | CATATGGGATGGCAGACTG |
| siRNA 1034 | 1034 | AGTCTGCCATCCCATATGC | 2776 | GCATATGGGATGGCAGACT |
| siRNA 1035 | 1035 | GTCTGCCATCCCATATGCA | 2777 | TGCATATGGGATGGCAGAC |
| siRNA 1036 | 1036 | TCTGCCATCCCATATGCAT | 2778 | ATGCATATGGGATGGCAGA |
| siRNA 1037 | 1037 | CTGCCATCCCATATGCATT | 2779 | AATGCATATGGGATGGCAG |
| siRNA 1038 | 1038 | TGCCATCCCATATGCATTA | 2780 | TAATGCATATGGGATGGCA |
| siRNA 1039 | 1039 | GCCATCCCATATGCATTAA | 2781 | TTAATGCATATGGGATGGC |
| siRNA 1040 | 1040 | CCATCCCATATGCATTAAG | 2782 | CTTAATGCATATGGGATGG |
| siRNA 1041 | 1041 | CATCCCATATGCATTAAGA | 2783 | TCTTAATGCATATGGGATG |
| siRNA 1042 | 1042 | ATCCCATATGCATTAAGAG | 2784 | CTCTTAATGCATATGGGAT |
| siRNA 1043 | 1043 | TCCCATATGCATTAAGAGT | 2785 | ACTCTTAATGCATATGGGA |
| siRNA 1044 | 1044 | CCCATATGCATTAAGAGTG | 2786 | CACTCTTAATGCATATGGG |
| siRNA 1045 | 1045 | CCATATGCATTAAGAGTGG | 2787 | CCACTCTTAATGCATATGG |
| siRNA 1046 | 1046 | CATATGCATTAAGAGTGGA | 2788 | TCCACTCTTAATGCATATG |
| siRNA 1047 | 1047 | ATATGCATTAAGAGTGGAA | 2789 | TTCCACTCTTAATGCATAT |
| siRNA 1048 | 1048 | TATGCATTAAGAGTGGAAC | 2790 | GTTCCACTCTTAATGCATA |
| siRNA 1049 | 1049 | ATGCATTAAGAGTGGAACT | 2791 | AGTTCCACTCTTAATGCAT |
| siRNA 1050 | 1050 | TGCATTAAGAGTGGAACTG | 2792 | CAGTTCCACTCTTAATGCA |
| siRNA 1051 | 1051 | GCATTAAGAGTGGAACTGG | 2793 | CCAGTTCCACTCTTAATGC |
| siRNA 1052 | 1052 | CATTAAGAGTGGAACTGGA | 2794 | TCCAGTTCCACTCTTAATG |
| siRNA 1053 | 1053 | ATTAAGAGTGGAACTGGAA | 2795 | TTCCAGTTCCACTCTTAAT |
| siRNA 1054 | 1054 | TTAAGAGTGGAACTGGAAG | 2796 | CTTCCAGTTCCACTCTTAA |
| siRNA 1055 | 1055 | TAAGAGTGGAACTGGAAGA | 2797 | TCTTCCAGTTCCACTCTTA |
| siRNA 1056 | 1056 | AAGAGTGGAACTGGAAGAC | 2798 | GTCTTCCAGTTCCACTCTT |
| siRNA 1057 | 1057 | AGAGTGGAACTGGAAGACT | 2799 | AGTCTTCCAGTTCCACTCT |
| siRNA 1058 | 1058 | GAGTGGAACTGGAAGACTG | 2800 | CAGTCTTCCAGTTCCACTC |
| siRNA 1059 | 1059 | AGTGGAACTGGAAGACTGG | 2801 | CCAGTCTTCCAGTTCCACT |
| siRNA 1060 | 1060 | GTGGAACTGGAAGACTGGA | 2802 | TCCAGTCTTCCAGTTCCAC |
| siRNA 1061 | 1061 | TGGAACTGGAAGACTGGAA | 2803 | TTCCAGTCTTCCAGTTCCA |
| siRNA 1062 | 1062 | GGAACTGGAAGACTGGAAT | 2804 | ATTCCAGTCTTCCAGTTCC |
| siRNA 1063 | 1063 | GAACTGGAAGACTGGAATG | 2805 | CATTCCAGTCTTCCAGTTC |
| siRNA 1064 | 1064 | AACTGGAAGACTGGAATGG | 2806 | CCATTCCAGTCTTCCAGTT |
| siRNA 1065 | 1065 | ACTGGAAGACTGGAATGGC | 2807 | GCCATTCCAGTCTTCCAGT |
| siRNA 1066 | 1066 | CTGGAAGACTGGAATGGCA | 2808 | TGCCATTCCAGTCTTCCAG |
| siRNA 1067 | 1067 | TGGAAGACTGGAATGGCAG | 2809 | CTGCCATTCCAGTCTTCCA |
| siRNA 1068 | 1068 | GGAAGACTGGAATGGCAGA | 2810 | TCTGCCATTCCAGTCTTCC |
| siRNA 1069 | 1069 | GAAGACTGGAATGGCAGAA | 2811 | TTCTGCCATTCCAGTCTTC |
| siRNA 1070 | 1070 | AAGACTGGAATGGCAGAAC | 2812 | GTTCTGCCATTCCAGTCTT |
| siRNA 1071 | 1071 | AGACTGGAATGGCAGAACC | 2813 | GGTTCTGCCATTCCAGTCT |
| siRNA 1072 | 1072 | GACTGGAATGGCAGAACCA | 2814 | TGGTTCTGCCATTCCAGTC |
| siRNA 1073 | 1073 | ACTGGAATGGCAGAACCAG | 2815 | CTGGTTCTGCCATTCCAGT |
| siRNA 1074 | 1074 | CTGGAATGGCAGAACCAGT | 2816 | ACTGGTTCTGCCATTCCAG |
| siRNA 1075 | 1075 | TGGAATGGCAGAACCAGTA | 2817 | TACTGGTTCTGCCATTCCA |
| siRNA 1076 | 1076 | GGAATGGCAGAACCAGTAC | 2818 | GTACTGGTTCTGCCATTCC |
| siRNA 1077 | 1077 | GAATGGCAGAACCAGTACT | 2819 | AGTACTGGTTCTGCCATTC |
| siRNA 1078 | 1078 | AATGGCAGAACCAGTACTG | 2820 | CAGTACTGGTTCTGCCATT |
| siRNA 1079 | 1079 | ATGGCAGAACCAGTACTGC | 2821 | GCAGTACTGGTTCTGCCAT |
| siRNA 1080 | 1080 | TGGCAGAACCAGTACTGCA | 2822 | TGCAGTACTGGTTCTGCCA |
| siRNA 1081 | 1081 | GGCAGAACCAGTACTGCAG | 2823 | CTGCAGTACTGGTTCTGCC |
| siRNA 1082 | 1082 | GCAGAACCAGTACTGCAGA | 2824 | TCTGCAGTACTGGTTCTGC |
| siRNA 1083 | 1083 | CAGAACCAGTACTGCAGAC | 2825 | GTCTGCAGTACTGGTTCTG |
| siRNA 1084 | 1084 | AGAACCAGTACTGCAGACT | 2826 | AGTCTGCAGTACTGGTTCT |
| siRNA 1085 | 1085 | GAACCAGTACTGCAGACTA | 2827 | TAGTCTGCAGTACTGGTTC |
| siRNA 1086 | 1086 | AACCAGTACTGCAGACTAT | 2828 | ATAGTCTGCAGTACTGGTT |
| siRNA 1087 | 1087 | ACCAGTACTGCAGACTATG | 2829 | CATAGTCTGCAGTACTGGT |
| siRNA 1088 | 1088 | CCAGTACTGCAGACTATGC | 2830 | GCATAGTCTGCAGTACTGG |
| siRNA 1089 | 1089 | CAGTACTGCAGACTATGCC | 2831 | GGCATAGTCTGCAGTACTG |
| siRNA 1090 | 1090 | AGTACTGCAGACTATGCCA | 2832 | TGGCATAGTCTGCAGTACT |
| siRNA 1091 | 1091 | GTACTGCAGACTATGCCAT | 2833 | ATGGCATAGTCTGCAGTAC |
| siRNA 1092 | 1092 | TACTGCAGACTATGCCATG | 2834 | CATGGCATAGTCTGCAGTA |
| siRNA 1093 | 1093 | ACTGCAGACTATGCCATGT | 2835 | ACATGGCATAGTCTGCAGT |
| siRNA 1094 | 1094 | CTGCAGACTATGCCATGTT | 2836 | AACATGGCATAGTCTGCAG |
| siRNA 1095 | 1095 | TGCAGACTATGCCATGTTC | 2837 | GAACATGGCATAGTCTGCA |
| siRNA 1096 | 1096 | GCAGACTATGCCATGTTCA | 2838 | TGAACATGGCATAGTCTGC |
| siRNA 1097 | 1097 | CAGACTATGCCATGTTCAA | 2839 | TTGAACATGGCATAGTCTG |
| siRNA 1098 | 1098 | AGACTATGCCATGTTCAAG | 2840 | CTTGAACATGGCATAGTCT |
| siRNA 1099 | 1099 | GACTATGCCATGTTCAAGG | 2841 | CCTTGAACATGGCATAGTC |
| siRNA 1100 | 1100 | ACTATGCCATGTTCAAGGT | 2842 | ACCTTGAACATGGCATAGT |
| siRNA 1101 | 1101 | CTATGCCATGTTCAAGGTG | 2843 | CACCTTGAACATGGCATAG |
| siRNA 1102 | 1102 | TATGCCATGTTCAAGGTGG | 2844 | CCACCTTGAACATGGCATA |
| siRNA 1103 | 1103 | ATGCCATGTTCAAGGTGGG | 2845 | CCCACCTTGAACATGGCAT |
| siRNA 1104 | 1104 | TGCCATGTTCAAGGTGGGA | 2846 | TCCCACCTTGAACATGGCA |
| siRNA 1105 | 1105 | GCCATGTTCAAGGTGGGAC | 2847 | GTCCCACCTTGAACATGGC |
| siRNA 1106 | 1106 | CCATGTTCAAGGTGGGACC | 2848 | GGTCCCACCTTGAACATGG |
| siRNA 1107 | 1107 | CATGTTCAAGGTGGGACCT | 2849 | AGGTCCCACCTTGAACATG |
| siRNA 1108 | 1108 | ATGTTCAAGGTGGGACCTG | 2850 | CAGGTCCCACCTTGAACAT |
| siRNA 1109 | 1109 | TGTTCAAGGTGGGACCTGA | 2851 | TCAGGTCCCACCTTGAACA |
| siRNA 1110 | 1110 | GTTCAAGGTGGGACCTGAA | 2852 | TTCAGGTCCCACCTTGAAC |
| siRNA 1111 | 1111 | TTCAAGGTGGGACCTGAAG | 2853 | CTTCAGGTCCCACCTTGAA |
| siRNA 1112 | 1112 | TCAAGGTGGGACCTGAAGC | 2854 | GCTTCAGGTCCCACCTTGA |
| siRNA 1113 | 1113 | CAAGGTGGGACCTGAAGCT | 2855 | AGCTTCAGGTCCCACCTTG |
| siRNA 1114 | 1114 | AAGGTGGGACCTGAAGCTG | 2856 | CAGCTTCAGGTCCCACCTT |
| siRNA 1115 | 1115 | AGGTGGGACCTGAAGCTGA | 2857 | TCAGCTTCAGGTCCCACCT |
| siRNA 1116 | 1116 | GGTGGGACCTGAAGCTGAC | 2858 | GTCAGCTTCAGGTCCCACC |
| siRNA 1117 | 1117 | GTGGGACCTGAAGCTGACA | 2859 | TGTCAGCTTCAGGTCCCAC |
| siRNA 1118 | 1118 | TGGGACCTGAAGCTGACAA | 2860 | TTGTCAGCTTCAGGTCCCA |
| siRNA 1119 | 1119 | GGGACCTGAAGCTGACAAG | 2861 | CTTGTCAGCTTCAGGTCCC |
| siRNA 1120 | 1120 | GGACCTGAAGCTGACAAGT | 2862 | ACTTGTCAGCTTCAGGTCC |
| siRNA 1121 | 1121 | GACCTGAAGCTGACAAGTA | 2863 | TACTTGTCAGCTTCAGGTC |
| siRNA 1122 | 1122 | ACCTGAAGCTGACAAGTAC | 2864 | GTACTTGTCAGCTTCAGGT |
| siRNA 1123 | 1123 | CCTGAAGCTGACAAGTACC | 2865 | GGTACTTGTCAGCTTCAGG |
| siRNA 1124 | 1124 | CTGAAGCTGACAAGTACCG | 2866 | CGGTACTTGTCAGCTTCAG |
| siRNA 1125 | 1125 | TGAAGCTGACAAGTACCGC | 2867 | GCGGTACTTGTCAGCTTCA |
| siRNA 1126 | 1126 | GAAGCTGACAAGTACCGCC | 2868 | GGCGGTACTTGTCAGCTTC |
| siRNA 1127 | 1127 | AAGCTGACAAGTACCGCCT | 2869 | AGGCGGTACTTGTCAGCTT |
| siRNA 1128 | 1128 | AGCTGACAAGTACCGCCTA | 2870 | TAGGCGGTACTTGTCAGCT |
| siRNA 1129 | 1129 | GCTGACAAGTACCGCCTAA | 2871 | TTAGGCGGTACTTGTCAGC |
| siRNA 1130 | 1130 | CTGACAAGTACCGCCTAAC | 2872 | GTTAGGCGGTACTTGTCAG |
| siRNA 1131 | 1131 | TGACAAGTACCGCCTAACA | 2873 | TGTTAGGCGGTACTTGTCA |
| siRNA 1132 | 1132 | GACAAGTACCGCCTAACAT | 2874 | ATGTTAGGCGGTACTTGTC |
| siRNA 1133 | 1133 | ACAAGTACCGCCTAACATA | 2875 | TATGTTAGGCGGTACTTGT |
| siRNA 1134 | 1134 | CAAGTACCGCCTAACATAT | 2876 | ATATGTTAGGCGGTACTTG |
| siRNA 1135 | 1135 | AAGTACCGCCTAACATATG | 2877 | CATATGTTAGGCGGTACTT |
| siRNA 1136 | 1136 | AGTACCGCCTAACATATGC | 2878 | GCATATGTTAGGCGGTACT |
| siRNA 1137 | 1137 | GTACCGCCTAACATATGCC | 2879 | GGCATATGTTAGGCGGTAC |
| siRNA 1138 | 1138 | TACCGCCTAACATATGCCT | 2880 | AGGCATATGTTAGGCGGTA |
| siRNA 1139 | 1139 | ACCGCCTAACATATGCCTA | 2881 | TAGGCATATGTTAGGCGGT |
| siRNA 1140 | 1140 | CCGCCTAACATATGCCTAC | 2882 | GTAGGCATATGTTAGGCGG |
| siRNA 1141 | 1141 | CGCCTAACATATGCCTACT | 2883 | AGTAGGCATATGTTAGGCG |
| siRNA 1142 | 1142 | GCCTAACATATGCCTACTT | 2884 | AAGTAGGCATATGTTAGGC |
| siRNA 1143 | 1143 | CCTAACATATGCCTACTTC | 2885 | GAAGTAGGCATATGTTAGG |
| siRNA 1144 | 1144 | CTAACATATGCCTACTTCG | 2886 | CGAAGTAGGCATATGTTAG |
| siRNA 1145 | 1145 | TAACATATGCCTACTTCGC | 2887 | GCGAAGTAGGCATATGTTA |
| siRNA 1146 | 1146 | AACATATGCCTACTTCGCT | 2888 | AGCGAAGTAGGCATATGTT |
| siRNA 1147 | 1147 | ACATATGCCTACTTCGCTG | 2889 | CAGCGAAGTAGGCATATGT |
| siRNA 1148 | 1148 | CATATGCCTACTTCGCTGG | 2890 | CCAGCGAAGTAGGCATATG |
| siRNA 1149 | 1149 | ATATGCCTACTTCGCTGGT | 2891 | ACCAGCGAAGTAGGCATAT |
| siRNA 1150 | 1150 | TATGCCTACTTCGCTGGTG | 2892 | CACCAGCGAAGTAGGCATA |
| siRNA 1151 | 1151 | ATGCCTACTTCGCTGGTGG | 2893 | CCACCAGCGAAGTAGGCAT |
| siRNA 1152 | 1152 | TGCCTACTTCGCTGGTGGG | 2894 | CCCACCAGCGAAGTAGGCA |
| siRNA 1153 | 1153 | GCCTACTTCGCTGGTGGGG | 2895 | CCCCACCAGCGAAGTAGGC |
| siRNA 1154 | 1154 | CCTACTTCGCTGGTGGGGA | 2896 | TCCCCACCAGCGAAGTAGG |
| siRNA 1155 | 1155 | CTACTTCGCTGGTGGGGAT | 2897 | ATCCCCACCAGCGAAGTAG |
| siRNA 1156 | 1156 | TACTTCGCTGGTGGGGATG | 2898 | CATCCCCACCAGCGAAGTA |
| siRNA 1157 | 1157 | ACTTCGCTGGTGGGGATGC | 2899 | GCATCCCCACCAGCGAAGT |
| siRNA 1158 | 1158 | CTTCGCTGGTGGGGATGCT | 2900 | AGCATCCCCACCAGCGAAG |
| siRNA 1159 | 1159 | TTCGCTGGTGGGGATGCTG | 2901 | CAGCATCCCCACCAGCGAA |
| siRNA 1160 | 1160 | TCGCTGGTGGGGATGCTGG | 2902 | CCAGCATCCCCACCAGCGA |
| siRNA 1161 | 1161 | CGCTGGTGGGGATGCTGGA | 2903 | TCCAGCATCCCCACCAGCG |
| siRNA 1162 | 1162 | GCTGGTGGGGATGCTGGAG | 2904 | CTCCAGCATCCCCACCAGC |
| siRNA 1163 | 1163 | CTGGTGGGGATGCTGGAGA | 2905 | TCTCCAGCATCCCCACCAG |
| siRNA 1164 | 1164 | TGGTGGGGATGCTGGAGAT | 2906 | ATCTCCAGCATCCCCACCA |
| siRNA 1165 | 1165 | GGTGGGGATGCTGGAGATG | 2907 | CATCTCCAGCATCCCCACC |
| siRNA 1166 | 1166 | GTGGGGATGCTGGAGATGC | 2908 | GCATCTCCAGCATCCCCAC |
| siRNA 1167 | 1167 | TGGGGATGCTGGAGATGCC | 2909 | GGCATCTCCAGCATCCCCA |
| siRNA 1168 | 1168 | GGGGATGCTGGAGATGCCT | 2910 | AGGCATCTCCAGCATCCCC |
| siRNA 1169 | 1169 | GGGATGCTGGAGATGCCTT | 2911 | AAGGCATCTCCAGCATCCC |
| siRNA 1170 | 1170 | GGATGCTGGAGATGCCTTT | 2912 | AAAGGCATCTCCAGCATCC |
| siRNA 1171 | 1171 | GATGCTGGAGATGCCTTTG | 2913 | CAAAGGCATCTCCAGCATC |
| siRNA 1172 | 1172 | ATGCTGGAGATGCCTTTGA | 2914 | TCAAAGGCATCTCCAGCAT |
| siRNA 1173 | 1173 | TGCTGGAGATGCCTTTGAT | 2915 | ATCAAAGGCATCTCCAGCA |
| siRNA 1174 | 1174 | GCTGGAGATGCCTTTGATG | 2916 | CATCAAAGGCATCTCCAGC |
| siRNA 1175 | 1175 | CTGGAGATGCCTTTGATGG | 2917 | CCATCAAAGGCATCTCCAG |
| siRNA 1176 | 1176 | TGGAGATGCCTTTGATGGC | 2918 | GCCATCAAAGGCATCTCCA |
| siRNA 1177 | 1177 | GGAGATGCCTTTGATGGCT | 2919 | AGCCATCAAAGGCATCTCC |
| siRNA 1178 | 1178 | GAGATGCCTTTGATGGCTT | 2920 | AAGCCATCAAAGGCATCTC |
| siRNA 1179 | 1179 | AGATGCCTTTGATGGCTTT | 2921 | AAAGCCATCAAAGGCATCT |
| siRNA 1180 | 1180 | GATGCCTTTGATGGCTTTG | 2922 | CAAAGCCATCAAAGGCATC |
| siRNA 1181 | 1181 | ATGCCTTTGATGGCTTTGA | 2923 | TCAAAGCCATCAAAGGCAT |
| siRNA 1182 | 1182 | TGCCTTTGATGGCTTTGAT | 2924 | ATCAAAGCCATCAAAGGCA |
| siRNA 1183 | 1183 | GCCTTTGATGGCTTTGATT | 2925 | AATCAAAGCCATCAAAGGC |
| siRNA 1184 | 1184 | CCTTTGATGGCTTTGATTT | 2926 | AAATCAAAGCCATCAAAGG |
| siRNA 1185 | 1185 | CTTTGATGGCTTTGATTTT | 2927 | AAAATCAAAGCCATCAAAG |
| siRNA 1186 | 1186 | TTTGATGGCTTTGATTTTG | 2928 | CAAAATCAAAGCCATCAAA |
| siRNA 1187 | 1187 | TTGATGGCTTTGATTTTGG | 2929 | CCAAAATCAAAGCCATCAA |
| siRNA 1188 | 1188 | TGATGGCTTTGATTTTGGC | 2930 | GCCAAAATCAAAGCCATCA |
| siRNA 1189 | 1189 | GATGGCTTTGATTTTGGCG | 2931 | CGCCAAAATCAAAGCCATC |
| siRNA 1190 | 1190 | ATGGCTTTGATTTTGGCGA | 2932 | TCGCCAAAATCAAAGCCAT |
| siRNA 1191 | 1191 | TGGCTTTGATTTTGGCGAT | 2933 | ATCGCCAAAATCAAAGCCA |
| siRNA 1192 | 1192 | GGCTTTGATTTTGGCGATG | 2934 | CATCGCCAAAATCAAAGCC |
| siRNA 1193 | 1193 | GCTTTGATTTTGGCGATGA | 2935 | TCATCGCCAAAATCAAAGC |
| siRNA 1194 | 1194 | CTTTGATTTTGGCGATGAT | 2936 | ATCATCGCCAAAATCAAAG |
| siRNA 1195 | 1195 | TTTGATTTTGGCGATGATC | 2937 | GATCATCGCCAAAATCAAA |
| siRNA 1196 | 1196 | TTGATTTTGGCGATGATCC | 2938 | GGATCATCGCCAAAATCAA |
| siRNA 1197 | 1197 | TGATTTTGGCGATGATCCT | 2939 | AGGATCATCGCCAAAATCA |
| siRNA 1198 | 1198 | GATTTTGGCGATGATCCTA | 2940 | TAGGATCATCGCCAAAATC |
| siRNA 1199 | 1199 | ATTTTGGCGATGATCCTAG | 2941 | CTAGGATCATCGCCAAAAT |
| siRNA 1200 | 1200 | TTTTGGCGATGATCCTAGT | 2942 | ACTAGGATCATCGCCAAAA |
| siRNA 1201 | 1201 | TTTGGCGATGATCCTAGTG | 2943 | CACTAGGATCATCGCCAAA |
| siRNA 1202 | 1202 | TTGGCGATGATCCTAGTGA | 2944 | TCACTAGGATCATCGCCAA |
| siRNA 1203 | 1203 | TGGCGATGATCCTAGTGAC | 2945 | GTCACTAGGATCATCGCCA |
| siRNA 1204 | 1204 | GGCGATGATCCTAGTGACA | 2946 | TGTCACTAGGATCATCGCC |
| siRNA 1205 | 1205 | GCGATGATCCTAGTGACAA | 2947 | TTGTCACTAGGATCATCGC |
| siRNA 1206 | 1206 | CGATGATCCTAGTGACAAG | 2948 | CTTGTCACTAGGATCATCG |
| siRNA 1207 | 1207 | GATGATCCTAGTGACAAGT | 2949 | ACTTGTCACTAGGATCATC |
| siRNA 1208 | 1208 | ATGATCCTAGTGACAAGTT | 2950 | AACTTGTCACTAGGATCAT |
| siRNA 1209 | 1209 | TGATCCTAGTGACAAGTTT | 2951 | AAACTTGTCACTAGGATCA |
| siRNA 1210 | 1210 | GATCCTAGTGACAAGTTTT | 2952 | AAAACTTGTCACTAGGATC |
| siRNA 1211 | 1211 | ATCCTAGTGACAAGTTTTT | 2953 | AAAAACTTGTCACTAGGAT |
| siRNA 1212 | 1212 | TCCTAGTGACAAGTTTTTC | 2954 | GAAAAACTTGTCACTAGGA |
| siRNA 1213 | 1213 | CCTAGTGACAAGTTTTTCA | 2955 | TGAAAAACTTGTCACTAGG |
| siRNA 1214 | 1214 | CTAGTGACAAGTTTTTCAC | 2956 | GTGAAAAACTTGTCACTAG |
| siRNA 1215 | 1215 | TAGTGACAAGTTTTTCACA | 2957 | TGTGAAAAACTTGTCACTA |
| siRNA 1216 | 1216 | AGTGACAAGTTTTTCACAT | 2958 | ATGTGAAAAACTTGTCACT |
| siRNA 1217 | 1217 | GTGACAAGTTTTTCACATC | 2959 | GATGTGAAAAACTTGTCAC |
| siRNA 1218 | 1218 | TGACAAGTTTTTCACATCC | 2960 | GGATGTGAAAAACTTGTCA |
| siRNA 1219 | 1219 | GACAAGTTTTTCACATCCC | 2961 | GGGATGTGAAAAACTTGTC |
| siRNA 1220 | 1220 | ACAAGTTTTTCACATCCCA | 2962 | TGGGATGTGAAAAACTTGT |
| siRNA 1221 | 1221 | CAAGTTTTTCACATCCCAT | 2963 | ATGGGATGTGAAAAACTTG |
| siRNA 1222 | 1222 | AAGTTTTTCACATCCCATA | 2964 | TATGGGATGTGAAAAACTT |
| siRNA 1223 | 1223 | AGTTTTTCACATCCCATAA | 2965 | TTATGGGATGTGAAAAACT |
| siRNA 1224 | 1224 | GTTTTTCACATCCCATAAT | 2966 | ATTATGGGATGTGAAAAAC |
| siRNA 1225 | 1225 | TTTTTCACATCCCATAATG | 2967 | CATTATGGGATGTGAAAAA |
| siRNA 1226 | 1226 | TTTTCACATCCCATAATGG | 2968 | CCATTATGGGATGTGAAAA |
| siRNA 1227 | 1227 | TTTCACATCCCATAATGGC | 2969 | GCCATTATGGGATGTGAAA |
| siRNA 1228 | 1228 | TTCACATCCCATAATGGCA | 2970 | TGCCATTATGGGATGTGAA |
| siRNA 1229 | 1229 | TCACATCCCATAATGGCAT | 2971 | ATGCCATTATGGGATGTGA |
| siRNA 1230 | 1230 | CACATCCCATAATGGCATG | 2972 | CATGCCATTATGGGATGTG |
| siRNA 1231 | 1231 | ACATCCCATAATGGCATGC | 2973 | GCATGCCATTATGGGATGT |
| siRNA 1232 | 1232 | CATCCCATAATGGCATGCA | 2974 | TGCATGCCATTATGGGATG |
| siRNA 1233 | 1233 | ATCCCATAATGGCATGCAG | 2975 | CTGCATGCCATTATGGGAT |
| siRNA 1234 | 1234 | TCCCATAATGGCATGCAGT | 2976 | ACTGCATGCCATTATGGGA |
| siRNA 1235 | 1235 | CCCATAATGGCATGCAGTT | 2977 | AACTGCATGCCATTATGGG |
| siRNA 1236 | 1236 | CCATAATGGCATGCAGTTC | 2978 | GAACTGCATGCCATTATGG |
| siRNA 1237 | 1237 | CATAATGGCATGCAGTTCA | 2979 | TGAACTGCATGCCATTATG |
| siRNA 1238 | 1238 | ATAATGGCATGCAGTTCAG | 2980 | CTGAACTGCATGCCATTAT |
| siRNA 1239 | 1239 | TAATGGCATGCAGTTCAGT | 2981 | ACTGAACTGCATGCCATTA |
| siRNA 1240 | 1240 | AATGGCATGCAGTTCAGTA | 2982 | TACTGAACTGCATGCCATT |
| siRNA 1241 | 1241 | ATGGCATGCAGTTCAGTAC | 2983 | GTACTGAACTGCATGCCAT |
| siRNA 1242 | 1242 | TGGCATGCAGTTCAGTACC | 2984 | GGTACTGAACTGCATGCCA |
| siRNA 1243 | 1243 | GGCATGCAGTTCAGTACCT | 2985 | AGGTACTGAACTGCATGCC |
| siRNA 1244 | 1244 | GCATGCAGTTCAGTACCTG | 2986 | CAGGTACTGAACTGCATGC |
| siRNA 1245 | 1245 | CATGCAGTTCAGTACCTGG | 2987 | CCAGGTACTGAACTGCATG |
| siRNA 1246 | 1246 | ATGCAGTTCAGTACCTGGG | 2988 | CCCAGGTACTGAACTGCAT |
| siRNA 1247 | 1247 | TGCAGTTCAGTACCTGGGA | 2989 | TCCCAGGTACTGAACTGCA |
| siRNA 1248 | 1248 | GCAGTTCAGTACCTGGGAC | 2990 | GTCCCAGGTACTGAACTGC |
| siRNA 1249 | 1249 | CAGTTCAGTACCTGGGACA | 2991 | TGTCCCAGGTACTGAACTG |
| siRNA 1250 | 1250 | AGTTCAGTACCTGGGACAA | 2992 | TTGTCCCAGGTACTGAACT |
| siRNA 1251 | 1251 | GTTCAGTACCTGGGACAAT | 2993 | ATTGTCCCAGGTACTGAAC |
| siRNA 1252 | 1252 | TTCAGTACCTGGGACAATG | 2994 | CATTGTCCCAGGTACTGAA |
| siRNA 1253 | 1253 | TCAGTACCTGGGACAATGA | 2995 | TCATTGTCCCAGGTACTGA |
| siRNA 1254 | 1254 | CAGTACCTGGGACAATGAC | 2996 | GTCATTGTCCCAGGTACTG |
| siRNA 1255 | 1255 | AGTACCTGGGACAATGACA | 2997 | TGTCATTGTCCCAGGTACT |
| siRNA 1256 | 1256 | GTACCTGGGACAATGACAA | 2998 | TTGTCATTGTCCCAGGTAC |
| siRNA 1257 | 1257 | TACCTGGGACAATGACAAT | 2999 | ATTGTCATTGTCCCAGGTA |
| siRNA 1258 | 1258 | ACCTGGGACAATGACAATG | 3000 | CATTGTCATTGTCCCAGGT |
| siRNA 1259 | 1259 | CCTGGGACAATGACAATGA | 3001 | TCATTGTCATTGTCCCAGG |
| siRNA 1260 | 1260 | CTGGGACAATGACAATGAT | 3002 | ATCATTGTCATTGTCCCAG |
| siRNA 1261 | 1261 | TGGGACAATGACAATGATA | 3003 | TATCATTGTCATTGTCCCA |
| siRNA 1262 | 1262 | GGGACAATGACAATGATAA | 3004 | TTATCATTGTCATTGTCCC |
| siRNA 1263 | 1263 | GGACAATGACAATGATAAG | 3005 | CTTATCATTGTCATTGTCC |
| siRNA 1264 | 1264 | GACAATGACAATGATAAGT | 3006 | ACTTATCATTGTCATTGTC |
| siRNA 1265 | 1265 | ACAATGACAATGATAAGTT | 3007 | AACTTATCATTGTCATTGT |
| siRNA 1266 | 1266 | CAATGACAATGATAAGTTT | 3008 | AAACTTATCATTGTCATTG |
| siRNA 1267 | 1267 | AATGACAATGATAAGTTTG | 3009 | CAAACTTATCATTGTCATT |
| siRNA 1268 | 1268 | ATGACAATGATAAGTTTGA | 3010 | TCAAACTTATCATTGTCAT |
| siRNA 1269 | 1269 | TGACAATGATAAGTTTGAA | 3011 | TTCAAACTTATCATTGTCA |
| siRNA 1270 | 1270 | GACAATGATAAGTTTGAAG | 3012 | CTTCAAACTTATCATTGTC |
| siRNA 1271 | 1271 | ACAATGATAAGTTTGAAGG | 3013 | CCTTCAAACTTATCATTGT |
| siRNA 1272 | 1272 | CAATGATAAGTTTGAAGGC | 3014 | GCCTTCAAACTTATCATTG |
| siRNA 1273 | 1273 | AATGATAAGTTTGAAGGCA | 3015 | TGCCTTCAAACTTATCATT |
| siRNA 1274 | 1274 | ATGATAAGTTTGAAGGCAA | 3016 | TTGCCTTCAAACTTATCAT |
| siRNA 1275 | 1275 | TGATAAGTTTGAAGGCAAC | 3017 | GTTGCCTTCAAACTTATCA |
| siRNA 1276 | 1276 | GATAAGTTTGAAGGCAACT | 3018 | AGTTGCCTTCAAACTTATC |
| siRNA 1277 | 1277 | ATAAGTTTGAAGGCAACTG | 3019 | CAGTTGCCTTCAAACTTAT |
| siRNA 1278 | 1278 | TAAGTTTGAAGGCAACTGT | 3020 | ACAGTTGCCTTCAAACTTA |
| siRNA 1279 | 1279 | AAGTTTGAAGGCAACTGTG | 3021 | CACAGTTGCCTTCAAACTT |
| siRNA 1280 | 1280 | AGTTTGAAGGCAACTGTGC | 3022 | GCACAGTTGCCTTCAAACT |
| siRNA 1281 | 1281 | GTTTGAAGGCAACTGTGCT | 3023 | AGCACAGTTGCCTTCAAAC |
| siRNA 1282 | 1282 | TTTGAAGGCAACTGTGCTG | 3024 | CAGCACAGTTGCCTTCAAA |
| siRNA 1283 | 1283 | TTGAAGGCAACTGTGCTGA | 3025 | TCAGCACAGTTGCCTTCAA |
| siRNA 1284 | 1284 | TGAAGGCAACTGTGCTGAA | 3026 | TTCAGCACAGTTGCCTTCA |
| siRNA 1285 | 1285 | GAAGGCAACTGTGCTGAAC | 3027 | GTTCAGCACAGTTGCCTTC |
| siRNA 1286 | 1286 | AAGGCAACTGTGCTGAACA | 3028 | TGTTCAGCACAGTTGCCTT |
| siRNA 1287 | 1287 | AGGCAACTGTGCTGAACAG | 3029 | CTGTTCAGCACAGTTGCCT |
| siRNA 1288 | 1288 | GGCAACTGTGCTGAACAGG | 3030 | CCTGTTCAGCACAGTTGCC |
| siRNA 1289 | 1289 | GCAACTGTGCTGAACAGGA | 3031 | TCCTGTTCAGCACAGTTGC |
| siRNA 1290 | 1290 | CAACTGTGCTGAACAGGAT | 3032 | ATCCTGTTCAGCACAGTTG |
| siRNA 1291 | 1291 | AACTGTGCTGAACAGGATG | 3033 | CATCCTGTTCAGCACAGTT |
| siRNA 1292 | 1292 | ACTGTGCTGAACAGGATGG | 3034 | CCATCCTGTTCAGCACAGT |
| siRNA 1293 | 1293 | CTGTGCTGAACAGGATGGA | 3035 | TCCATCCTGTTCAGCACAG |
| siRNA 1294 | 1294 | TGTGCTGAACAGGATGGAT | 3036 | ATCCATCCTGTTCAGCACA |
| siRNA 1295 | 1295 | GTGCTGAACAGGATGGATC | 3037 | GATCCATCCTGTTCAGCAC |
| siRNA 1296 | 1296 | TGCTGAACAGGATGGATCT | 3038 | AGATCCATCCTGTTCAGCA |
| siRNA 1297 | 1297 | GCTGAACAGGATGGATCTG | 3039 | CAGATCCATCCTGTTCAGC |
| siRNA 1298 | 1298 | CTGAACAGGATGGATCTGG | 3040 | CCAGATCCATCCTGTTCAG |
| siRNA 1299 | 1299 | TGAACAGGATGGATCTGGT | 3041 | ACCAGATCCATCCTGTTCA |
| siRNA 1300 | 1300 | GAACAGGATGGATCTGGTT | 3042 | AACCAGATCCATCCTGTTC |
| siRNA 1301 | 1301 | AACAGGATGGATCTGGTTG | 3043 | CAACCAGATCCATCCTGTT |
| siRNA 1302 | 1302 | ACAGGATGGATCTGGTTGG | 3044 | CCAACCAGATCCATCCTGT |
| siRNA 1303 | 1303 | CAGGATGGATCTGGTTGGT | 3045 | ACCAACCAGATCCATCCTG |
| siRNA 1304 | 1304 | AGGATGGATCTGGTTGGTG | 3046 | CACCAACCAGATCCATCCT |
| siRNA 1305 | 1305 | GGATGGATCTGGTTGGTGG | 3047 | CCACCAACCAGATCCATCC |
| siRNA 1306 | 1306 | GATGGATCTGGTTGGTGGA | 3048 | TCCACCAACCAGATCCATC |
| siRNA 1307 | 1307 | ATGGATCTGGTTGGTGGAT | 3049 | ATCCACCAACCAGATCCAT |
| siRNA 1308 | 1308 | TGGATCTGGTTGGTGGATG | 3050 | CATCCACCAACCAGATCCA |
| siRNA 1309 | 1309 | GGATCTGGTTGGTGGATGA | 3051 | TCATCCACCAACCAGATCC |
| siRNA 1310 | 1310 | GATCTGGTTGGTGGATGAA | 3052 | TTCATCCACCAACCAGATC |
| siRNA 1311 | 1311 | ATCTGGTTGGTGGATGAAC | 3053 | GTTCATCCACCAACCAGAT |
| siRNA 1312 | 1312 | TCTGGTTGGTGGATGAACA | 3054 | TGTTCATCCACCAACCAGA |
| siRNA 1313 | 1313 | CTGGTTGGTGGATGAACAA | 3055 | TTGTTCATCCACCAACCAG |
| siRNA 1314 | 1314 | TGGTTGGTGGATGAACAAG | 3056 | CTTGTTCATCCACCAACCA |
| siRNA 1315 | 1315 | GGTTGGTGGATGAACAAGT | 3057 | ACTTGTTCATCCACCAACC |
| siRNA 1316 | 1316 | GTTGGTGGATGAACAAGTG | 3058 | CACTTGTTCATCCACCAAC |
| siRNA 1317 | 1317 | TTGGTGGATGAACAAGTGT | 3059 | ACACTTGTTCATCCACCAA |
| siRNA 1318 | 1318 | TGGTGGATGAACAAGTGTC | 3060 | GACACTTGTTCATCCACCA |
| siRNA 1319 | 1319 | GGTGGATGAACAAGTGTCA | 3061 | TGACACTTGTTCATCCACC |
| siRNA 1320 | 1320 | GTGGATGAACAAGTGTCAC | 3062 | GTGACACTTGTTCATCCAC |
| siRNA 1321 | 1321 | TGGATGAACAAGTGTCACG | 3063 | CGTGACACTTGTTCATCCA |
| siRNA 1322 | 1322 | GGATGAACAAGTGTCACGC | 3064 | GCGTGACACTTGTTCATCC |
| siRNA 1323 | 1323 | GATGAACAAGTGTCACGCT | 3065 | AGCGTGACACTTGTTCATC |
| siRNA 1324 | 1324 | ATGAACAAGTGTCACGCTG | 3066 | CAGCGTGACACTTGTTCAT |
| siRNA 1325 | 1325 | TGAACAAGTGTCACGCTGG | 3067 | CCAGCGTGACACTTGTTCA |
| siRNA 1326 | 1326 | GAACAAGTGTCACGCTGGC | 3068 | GCCAGCGTGACACTTGTTC |
| siRNA 1327 | 1327 | AACAAGTGTCACGCTGGCC | 3069 | GGCCAGCGTGACACTTGTT |
| siRNA 1328 | 1328 | ACAAGTGTCACGCTGGCCA | 3070 | TGGCCAGCGTGACACTTGT |
| siRNA 1329 | 1329 | CAAGTGTCACGCTGGCCAT | 3071 | ATGGCCAGCGTGACACTTG |
| siRNA 1330 | 1330 | AAGTGTCACGCTGGCCATC | 3072 | GATGGCCAGCGTGACACTT |
| siRNA 1331 | 1331 | AGTGTCACGCTGGCCATCT | 3073 | AGATGGCCAGCGTGACACT |
| siRNA 1332 | 1332 | GTGTCACGCTGGCCATCTC | 3074 | GAGATGGCCAGCGTGACAC |
| siRNA 1333 | 1333 | TGTCACGCTGGCCATCTCA | 3075 | TGAGATGGCCAGCGTGACA |
| siRNA 1334 | 1334 | GTCACGCTGGCCATCTCAA | 3076 | TTGAGATGGCCAGCGTGAC |
| siRNA 1335 | 1335 | TCACGCTGGCCATCTCAAT | 3077 | ATTGAGATGGCCAGCGTGA |
| siRNA 1336 | 1336 | CACGCTGGCCATCTCAATG | 3078 | CATTGAGATGGCCAGCGTG |
| siRNA 1337 | 1337 | ACGCTGGCCATCTCAATGG | 3079 | CCATTGAGATGGCCAGCGT |
| siRNA 1338 | 1338 | CGCTGGCCATCTCAATGGA | 3080 | TCCATTGAGATGGCCAGCG |
| siRNA 1339 | 1339 | GCTGGCCATCTCAATGGAG | 3081 | CTCCATTGAGATGGCCAGC |
| siRNA 1340 | 1340 | CTGGCCATCTCAATGGAGT | 3082 | ACTCCATTGAGATGGCCAG |
| siRNA 1341 | 1341 | TGGCCATCTCAATGGAGTT | 3083 | AACTCCATTGAGATGGCCA |
| siRNA 1342 | 1342 | GGCCATCTCAATGGAGTTT | 3084 | AAACTCCATTGAGATGGCC |
| siRNA 1343 | 1343 | GCCATCTCAATGGAGTTTA | 3085 | TAAACTCCATTGAGATGGC |
| siRNA 1344 | 1344 | CCATCTCAATGGAGTTTAT | 3086 | ATAAACTCCATTGAGATGG |
| siRNA 1345 | 1345 | CATCTCAATGGAGTTTATT | 3087 | AATAAACTCCATTGAGATG |
| siRNA 1346 | 1346 | ATCTCAATGGAGTTTATTA | 3088 | TAATAAACTCCATTGAGAT |
| siRNA 1347 | 1347 | TCTCAATGGAGTTTATTAC | 3089 | GTAATAAACTCCATTGAGA |
| siRNA 1348 | 1348 | CTCAATGGAGTTTATTACC | 3090 | GGTAATAAACTCCATTGAG |
| siRNA 1349 | 1349 | TCAATGGAGTTTATTACCA | 3091 | TGGTAATAAACTCCATTGA |
| siRNA 1350 | 1350 | CAATGGAGTTTATTACCAA | 3092 | TTGGTAATAAACTCCATTG |
| siRNA 1351 | 1351 | AATGGAGTTTATTACCAAG | 3093 | CTTGGTAATAAACTCCATT |
| siRNA 1352 | 1352 | ATGGAGTTTATTACCAAGG | 3094 | CCTTGGTAATAAACTCCAT |
| siRNA 1353 | 1353 | TGGAGTTTATTACCAAGGT | 3095 | ACCTTGGTAATAAACTCCA |
| siRNA 1354 | 1354 | GGAGTTTATTACCAAGGTG | 3096 | CACCTTGGTAATAAACTCC |
| siRNA 1355 | 1355 | GAGTTTATTACCAAGGTGG | 3097 | CCACCTTGGTAATAAACTC |
| siRNA 1356 | 1356 | AGTTTATTACCAAGGTGGC | 3098 | GCCACCTTGGTAATAAACT |
| siRNA 1357 | 1357 | GTTTATTACCAAGGTGGCA | 3099 | TGCCACCTTGGTAATAAAC |
| siRNA 1358 | 1358 | TTTATTACCAAGGTGGCAC | 3100 | GTGCCACCTTGGTAATAAA |
| siRNA 1359 | 1359 | TTATTACCAAGGTGGCACT | 3101 | AGTGCCACCTTGGTAATAA |
| siRNA 1360 | 1360 | TATTACCAAGGTGGCACTT | 3102 | AAGTGCCACCTTGGTAATA |
| siRNA 1361 | 1361 | ATTACCAAGGTGGCACTTA | 3103 | TAAGTGCCACCTTGGTAAT |
| siRNA 1362 | 1362 | TTACCAAGGTGGCACTTAC | 3104 | GTAAGTGCCACCTTGGTAA |
| siRNA 1363 | 1363 | TACCAAGGTGGCACTTACT | 3105 | AGTAAGTGCCACCTTGGTA |
| siRNA 1364 | 1364 | ACCAAGGTGGCACTTACTC | 3106 | GAGTAAGTGCCACCTTGGT |
| siRNA 1365 | 1365 | CCAAGGTGGCACTTACTCA | 3107 | TGAGTAAGTGCCACCTTGG |
| siRNA 1366 | 1366 | CAAGGTGGCACTTACTCAA | 3108 | TTGAGTAAGTGCCACCTTG |
| siRNA 1367 | 1367 | AAGGTGGCACTTACTCAAA | 3109 | TTTGAGTAAGTGCCACCTT |
| siRNA 1368 | 1368 | AGGTGGCACTTACTCAAAA | 3110 | TTTTGAGTAAGTGCCACCT |
| siRNA 1369 | 1369 | GGTGGCACTTACTCAAAAG | 3111 | CTTTTGAGTAAGTGCCACC |
| siRNA 1370 | 1370 | GTGGCACTTACTCAAAAGC | 3112 | GCTTTTGAGTAAGTGCCAC |
| siRNA 1371 | 1371 | TGGCACTTACTCAAAAGCA | 3113 | TGCTTTTGAGTAAGTGCCA |
| siRNA 1372 | 1372 | GGCACTTACTCAAAAGCAT | 3114 | ATGCTTTTGAGTAAGTGCC |
| siRNA 1373 | 1373 | GCACTTACTCAAAAGCATC | 3115 | GATGCTTTTGAGTAAGTGC |
| siRNA 1374 | 1374 | CACTTACTCAAAAGCATCT | 3116 | AGATGCTTTTGAGTAAGTG |
| siRNA 1375 | 1375 | ACTTACTCAAAAGCATCTA | 3117 | TAGATGCTTTTGAGTAAGT |
| siRNA 1376 | 1376 | CTTACTCAAAAGCATCTAC | 3118 | GTAGATGCTTTTGAGTAAG |
| siRNA 1377 | 1377 | TTACTCAAAAGCATCTACT | 3119 | AGTAGATGCTTTTGAGTAA |
| siRNA 1378 | 1378 | TACTCAAAAGCATCTACTC | 3120 | GAGTAGATGCTTTTGAGTA |
| siRNA 1379 | 1379 | ACTCAAAAGCATCTACTCC | 3121 | GGAGTAGATGCTTTTGAGT |
| siRNA 1380 | 1380 | CTCAAAAGCATCTACTCCT | 3122 | AGGAGTAGATGCTTTTGAG |
| siRNA 1381 | 1381 | TCAAAAGCATCTACTCCTA | 3123 | TAGGAGTAGATGCTTTTGA |
| siRNA 1382 | 1382 | CAAAAGCATCTACTCCTAA | 3124 | TTAGGAGTAGATGCTTTTG |
| siRNA 1383 | 1383 | AAAAGCATCTACTCCTAAT | 3125 | ATTAGGAGTAGATGCTTTT |
| siRNA 1384 | 1384 | AAAGCATCTACTCCTAATG | 3126 | CATTAGGAGTAGATGCTTT |
| siRNA 1385 | 1385 | AAGCATCTACTCCTAATGG | 3127 | CCATTAGGAGTAGATGCTT |
| siRNA 1386 | 1386 | AGCATCTACTCCTAATGGT | 3128 | ACCATTAGGAGTAGATGCT |
| siRNA 1387 | 1387 | GCATCTACTCCTAATGGTT | 3129 | AACCATTAGGAGTAGATGC |
| siRNA 1388 | 1388 | CATCTACTCCTAATGGTTA | 3130 | TAACCATTAGGAGTAGATG |
| siRNA 1389 | 1389 | ATCTACTCCTAATGGTTAT | 3131 | ATAACCATTAGGAGTAGAT |
| siRNA 1390 | 1390 | TCTACTCCTAATGGTTATG | 3132 | CATAACCATTAGGAGTAGA |
| siRNA 1391 | 1391 | CTACTCCTAATGGTTATGA | 3133 | TCATAACCATTAGGAGTAG |
| siRNA 1392 | 1392 | TACTCCTAATGGTTATGAT | 3134 | ATCATAACCATTAGGAGTA |
| siRNA 1393 | 1393 | ACTCCTAATGGTTATGATA | 3135 | TATCATAACCATTAGGAGT |
| siRNA 1394 | 1394 | CTCCTAATGGTTATGATAA | 3136 | TTATCATAACCATTAGGAG |
| siRNA 1395 | 1395 | TCCTAATGGTTATGATAAT | 3137 | ATTATCATAACCATTAGGA |
| siRNA 1396 | 1396 | CCTAATGGTTATGATAATG | 3138 | CATTATCATAACCATTAGG |
| siRNA 1397 | 1397 | CTAATGGTTATGATAATGG | 3139 | CCATTATCATAACCATTAG |
| siRNA 1398 | 1398 | TAATGGTTATGATAATGGC | 3140 | GCCATTATCATAACCATTA |
| siRNA 1399 | 1399 | AATGGTTATGATAATGGCA | 3141 | TGCCATTATCATAACCATT |
| siRNA 1400 | 1400 | ATGGTTATGATAATGGCAT | 3142 | ATGCCATTATCATAACCAT |
| siRNA 1401 | 1401 | TGGTTATGATAATGGCATT | 3143 | AATGCCATTATCATAACCA |
| siRNA 1402 | 1402 | GGTTATGATAATGGCATTA | 3144 | TAATGCCATTATCATAACC |
| siRNA 1403 | 1403 | GTTATGATAATGGCATTAT | 3145 | ATAATGCCATTATCATAAC |
| siRNA 1404 | 1404 | TTATGATAATGGCATTATT | 3146 | AATAATGCCATTATCATAA |
| siRNA 1405 | 1405 | TATGATAATGGCATTATTT | 3147 | AAATAATGCCATTATCATA |
| siRNA 1406 | 1406 | ATGATAATGGCATTATTTG | 3148 | CAAATAATGCCATTATCAT |
| siRNA 1407 | 1407 | TGATAATGGCATTATTTGG | 3149 | CCAAATAATGCCATTATCA |
| siRNA 1408 | 1408 | GATAATGGCATTATTTGGG | 3150 | CCCAAATAATGCCATTATC |
| siRNA 1409 | 1409 | ATAATGGCATTATTTGGGC | 3151 | GCCCAAATAATGCCATTAT |
| siRNA 1410 | 1410 | TAATGGCATTATTTGGGCC | 3152 | GGCCCAAATAATGCCATTA |
| siRNA 1411 | 1411 | AATGGCATTATTTGGGCCA | 3153 | TGGCCCAAATAATGCCATT |
| siRNA 1412 | 1412 | ATGGCATTATTTGGGCCAC | 3154 | GTGGCCCAAATAATGCCAT |
| siRNA 1413 | 1413 | TGGCATTATTTGGGCCACT | 3155 | AGTGGCCCAAATAATGCCA |
| siRNA 1414 | 1414 | GGCATTATTTGGGCCACTT | 3156 | AAGTGGCCCAAATAATGCC |
| siRNA 1415 | 1415 | GCATTATTTGGGCCACTTG | 3157 | CAAGTGGCCCAAATAATGC |
| siRNA 1416 | 1416 | CATTATTTGGGCCACTTGG | 3158 | CCAAGTGGCCCAAATAATG |
| siRNA 1417 | 1417 | ATTATTTGGGCCACTTGGA | 3159 | TCCAAGTGGCCCAAATAAT |
| siRNA 1418 | 1418 | TTATTTGGGCCACTTGGAA | 3160 | TTCCAAGTGGCCCAAATAA |
| siRNA 1419 | 1419 | TATTTGGGCCACTTGGAAA | 3161 | TTTCCAAGTGGCCCAAATA |
| siRNA 1420 | 1420 | ATTTGGGCCACTTGGAAAA | 3162 | TTTTCCAAGTGGCCCAAAT |
| siRNA 1421 | 1421 | TTTGGGCCACTTGGAAAAC | 3163 | GTTTTCCAAGTGGCCCAAA |
| siRNA 1422 | 1422 | TTGGGCCACTTGGAAAACC | 3164 | GGTTTTCCAAGTGGCCCAA |
| siRNA 1423 | 1423 | TGGGCCACTTGGAAAACCC | 3165 | GGGTTTTCCAAGTGGCCCA |
| siRNA 1424 | 1424 | GGGCCACTTGGAAAACCCG | 3166 | CGGGTTTTCCAAGTGGCCC |
| siRNA 1425 | 1425 | GGCCACTTGGAAAACCCGG | 3167 | CCGGGTTTTCCAAGTGGCC |
| siRNA 1426 | 1426 | GCCACTTGGAAAACCCGGT | 3168 | ACCGGGTTTTCCAAGTGGC |
| siRNA 1427 | 1427 | CCACTTGGAAAACCCGGTG | 3169 | CACCGGGTTTTCCAAGTGG |
| siRNA 1428 | 1428 | CACTTGGAAAACCCGGTGG | 3170 | CCACCGGGTTTTCCAAGTG |
| siRNA 1429 | 1429 | ACTTGGAAAACCCGGTGGT | 3171 | ACCACCGGGTTTTCCAAGT |
| siRNA 1430 | 1430 | CTTGGAAAACCCGGTGGTA | 3172 | TACCACCGGGTTTTCCAAG |
| siRNA 1431 | 1431 | TTGGAAAACCCGGTGGTAT | 3173 | ATACCACCGGGTTTTCCAA |
| siRNA 1432 | 1432 | TGGAAAACCCGGTGGTATT | 3174 | AATACCACCGGGTTTTCCA |
| siRNA 1433 | 1433 | GGAAAACCCGGTGGTATTC | 3175 | GAATACCACCGGGTTTTCC |
| siRNA 1434 | 1434 | GAAAACCCGGTGGTATTCC | 3176 | GGAATACCACCGGGTTTTC |
| siRNA 1435 | 1435 | AAAACCCGGTGGTATTCCA | 3177 | TGGAATACCACCGGGTTTT |
| siRNA 1436 | 1436 | AAACCCGGTGGTATTCCAT | 3178 | ATGGAATACCACCGGGTTT |
| siRNA 1437 | 1437 | AACCCGGTGGTATTCCATG | 3179 | CATGGAATACCACCGGGTT |
| siRNA 1438 | 1438 | ACCCGGTGGTATTCCATGA | 3180 | TCATGGAATACCACCGGGT |
| siRNA 1439 | 1439 | CCCGGTGGTATTCCATGAA | 3181 | TTCATGGAATACCACCGGG |
| siRNA 1440 | 1440 | CCGGTGGTATTCCATGAAG | 3182 | CTTCATGGAATACCACCGG |
| siRNA 1441 | 1441 | CGGTGGTATTCCATGAAGA | 3183 | TCTTCATGGAATACCACCG |
| siRNA 1442 | 1442 | GGTGGTATTCCATGAAGAA | 3184 | TTCTTCATGGAATACCACC |
| siRNA 1443 | 1443 | GTGGTATTCCATGAAGAAA | 3185 | TTTCTTCATGGAATACCAC |
| siRNA 1444 | 1444 | TGGTATTCCATGAAGAAAA | 3186 | TTTTCTTCATGGAATACCA |
| siRNA 1445 | 1445 | GGTATTCCATGAAGAAAAC | 3187 | GTTTTCTTCATGGAATACC |
| siRNA 1446 | 1446 | GTATTCCATGAAGAAAACC | 3188 | GGTTTTCTTCATGGAATAC |
| siRNA 1447 | 1447 | TATTCCATGAAGAAAACCA | 3189 | TGGTTTTCTTCATGGAATA |
| siRNA 1448 | 1448 | ATTCCATGAAGAAAACCAC | 3190 | GTGGTTTTCTTCATGGAAT |
| siRNA 1449 | 1449 | TTCCATGAAGAAAACCACT | 3191 | AGTGGTTTTCTTCATGGAA |
| siRNA 1450 | 1450 | TCCATGAAGAAAACCACTA | 3192 | TAGTGGTTTTCTTCATGGA |
| siRNA 1451 | 1451 | CCATGAAGAAAACCACTAT | 3193 | ATAGTGGTTTTCTTCATGG |
| siRNA 1452 | 1452 | CATGAAGAAAACCACTATG | 3194 | CATAGTGGTTTTCTTCATG |
| siRNA 1453 | 1453 | ATGAAGAAAACCACTATGA | 3195 | TCATAGTGGTTTTCTTCAT |
| siRNA 1454 | 1454 | TGAAGAAAACCACTATGAA | 3196 | TTCATAGTGGTTTTCTTCA |
| siRNA 1455 | 1455 | GAAGAAAACCACTATGAAG | 3197 | CTTCATAGTGGTTTTCTTC |
| siRNA 1456 | 1456 | AAGAAAACCACTATGAAGA | 3198 | TCTTCATAGTGGTTTTCTT |
| siRNA 1457 | 1457 | AGAAAACCACTATGAAGAT | 3199 | ATCTTCATAGTGGTTTTCT |
| siRNA 1458 | 1458 | GAAAACCACTATGAAGATA | 3200 | TATCTTCATAGTGGTTTTC |
| siRNA 1459 | 1459 | AAAACCACTATGAAGATAA | 3201 | TTATCTTCATAGTGGTTTT |
| siRNA 1460 | 1460 | AAACCACTATGAAGATAAT | 3202 | ATTATCTTCATAGTGGTTT |
| siRNA 1461 | 1461 | AACCACTATGAAGATAATC | 3203 | GATTATCTTCATAGTGGTT |
| siRNA 1462 | 1462 | ACCACTATGAAGATAATCC | 3204 | GGATTATCTTCATAGTGGT |
| siRNA 1463 | 1463 | CCACTATGAAGATAATCCC | 3205 | GGGATTATCTTCATAGTGG |
| siRNA 1464 | 1464 | CACTATGAAGATAATCCCA | 3206 | TGGGATTATCTTCATAGTG |
| siRNA 1465 | 1465 | ACTATGAAGATAATCCCAT | 3207 | ATGGGATTATCTTCATAGT |
| siRNA 1466 | 1466 | CTATGAAGATAATCCCATT | 3208 | AATGGGATTATCTTCATAG |
| siRNA 1467 | 1467 | TATGAAGATAATCCCATTC | 3209 | GAATGGGATTATCTTCATA |
| siRNA 1468 | 1468 | ATGAAGATAATCCCATTCA | 3210 | TGAATGGGATTATCTTCAT |
| siRNA 1469 | 1469 | TGAAGATAATCCCATTCAA | 3211 | TTGAATGGGATTATCTTCA |
| siRNA 1470 | 1470 | GAAGATAATCCCATTCAAC | 3212 | GTTGAATGGGATTATCTTC |
| siRNA 1471 | 1471 | AAGATAATCCCATTCAACA | 3213 | TGTTGAATGGGATTATCTT |
| siRNA 1472 | 1472 | AGATAATCCCATTCAACAG | 3214 | CTGTTGAATGGGATTATCT |
| siRNA 1473 | 1473 | GATAATCCCATTCAACAGA | 3215 | TCTGTTGAATGGGATTATC |
| siRNA 1474 | 1474 | ATAATCCCATTCAACAGAC | 3216 | GTCTGTTGAATGGGATTAT |
| siRNA 1475 | 1475 | TAATCCCATTCAACAGACT | 3217 | AGTCTGTTGAATGGGATTA |
| siRNA 1476 | 1476 | AATCCCATTCAACAGACTC | 3218 | GAGTCTGTTGAATGGGATT |
| siRNA 1477 | 1477 | ATCCCATTCAACAGACTCA | 3219 | TGAGTCTGTTGAATGGGAT |
| siRNA 1478 | 1478 | TCCCATTCAACAGACTCAC | 3220 | GTGAGTCTGTTGAATGGGA |
| siRNA 1479 | 1479 | CCCATTCAACAGACTCACA | 3221 | TGTGAGTCTGTTGAATGGG |
| siRNA 1480 | 1480 | CCATTCAACAGACTCACAA | 3222 | TTGTGAGTCTGTTGAATGG |
| siRNA 1481 | 1481 | CATTCAACAGACTCACAAT | 3223 | ATTGTGAGTCTGTTGAATG |
| siRNA 1482 | 1482 | ATTCAACAGACTCACAATT | 3224 | AATTGTGAGTCTGTTGAAT |
| siRNA 1483 | 1483 | TTCAACAGACTCACAATTG | 3225 | CAATTGTGAGTCTGTTGAA |
| siRNA 1484 | 1484 | TCAACAGACTCACAATTGG | 3226 | CCAATTGTGAGTCTGTTGA |
| siRNA 1485 | 1485 | CAACAGACTCACAATTGGA | 3227 | TCCAATTGTGAGTCTGTTG |
| siRNA 1486 | 1486 | AACAGACTCACAATTGGAG | 3228 | CTCCAATTGTGAGTCTGTT |
| siRNA 1487 | 1487 | ACAGACTCACAATTGGAGA | 3229 | TCTCCAATTGTGAGTCTGT |
| siRNA 1488 | 1488 | CAGACTCACAATTGGAGAA | 3230 | TTCTCCAATTGTGAGTCTG |
| siRNA 1489 | 1489 | AGACTCACAATTGGAGAAG | 3231 | CTTCTCCAATTGTGAGTCT |
| siRNA 1490 | 1490 | GACTCACAATTGGAGAAGG | 3232 | CCTTCTCCAATTGTGAGTC |
| siRNA 1491 | 1491 | ACTCACAATTGGAGAAGGA | 3233 | TCCTTCTCCAATTGTGAGT |
| siRNA 1492 | 1492 | CTCACAATTGGAGAAGGAC | 3234 | GTCCTTCTCCAATTGTGAG |
| siRNA 1493 | 1493 | TCACAATTGGAGAAGGACA | 3235 | TGTCCTTCTCCAATTGTGA |
| siRNA 1494 | 1494 | CACAATTGGAGAAGGACAG | 3236 | CTGTCCTTCTCCAATTGTG |
| siRNA 1495 | 1495 | ACAATTGGAGAAGGACAGC | 3237 | GCTGTCCTTCTCCAATTGT |
| siRNA 1496 | 1496 | CAATTGGAGAAGGACAGCA | 3238 | TGCTGTCCTTCTCCAATTG |
| siRNA 1497 | 1497 | AATTGGAGAAGGACAGCAA | 3239 | TTGCTGTCCTTCTCCAATT |
| siRNA 1498 | 1498 | ATTGGAGAAGGACAGCAAC | 3240 | GTTGCTGTCCTTCTCCAAT |
| siRNA 1499 | 1499 | TTGGAGAAGGACAGCAACA | 3241 | TGTTGCTGTCCTTCTCCAA |
| siRNA 1500 | 1500 | TGGAGAAGGACAGCAACAC | 3242 | GTGTTGCTGTCCTTCTCCA |
| siRNA 1501 | 1501 | GGAGAAGGACAGCAACACC | 3243 | GGTGTTGCTGTCCTTCTCC |
| siRNA 1502 | 1502 | GAGAAGGACAGCAACACCA | 3244 | TGGTGTTGCTGTCCTTCTC |
| siRNA 1503 | 1503 | AGAAGGACAGCAACACCAC | 3245 | GTGGTGTTGCTGTCCTTCT |
| siRNA 1504 | 1504 | GAAGGACAGCAACACCACC | 3246 | GGTGGTGTTGCTGTCCTTC |
| siRNA 1505 | 1505 | AAGGACAGCAACACCACCT | 3247 | AGGTGGTGTTGCTGTCCTT |
| siRNA 1506 | 1506 | AGGACAGCAACACCACCTG | 3248 | CAGGTGGTGTTGCTGTCCT |
| siRNA 1507 | 1507 | GGACAGCAACACCACCTGG | 3249 | CCAGGTGGTGTTGCTGTCC |
| siRNA 1508 | 1508 | GACAGCAACACCACCTGGG | 3250 | CCCAGGTGGTGTTGCTGTC |
| siRNA 1509 | 1509 | ACAGCAACACCACCTGGGG | 3251 | CCCCAGGTGGTGTTGCTGT |
| siRNA 1510 | 1510 | CAGCAACACCACCTGGGGG | 3252 | CCCCCAGGTGGTGTTGCTG |
| siRNA 1511 | 1511 | AGCAACACCACCTGGGGGG | 3253 | CCCCCCAGGTGGTGTTGCT |
| siRNA 1512 | 1512 | GCAACACCACCTGGGGGGA | 3254 | TCCCCCCAGGTGGTGTTGC |
| siRNA 1513 | 1513 | CAACACCACCTGGGGGGAG | 3255 | CTCCCCCCAGGTGGTGTTG |
| siRNA 1514 | 1514 | AACACCACCTGGGGGGAGC | 3256 | GCTCCCCCCAGGTGGTGTT |
| siRNA 1515 | 1515 | ACACCACCTGGGGGGAGCC | 3257 | GGCTCCCCCCAGGTGGTGT |
| siRNA 1516 | 1516 | CACCACCTGGGGGGAGCCA | 3258 | TGGCTCCCCCCAGGTGGTG |
| siRNA 1517 | 1517 | ACCACCTGGGGGGAGCCAA | 3259 | TTGGCTCCCCCCAGGTGGT |
| siRNA 1518 | 1518 | CCACCTGGGGGGAGCCAAA | 3260 | TTTGGCTCCCCCCAGGTGG |
| siRNA 1519 | 1519 | CACCTGGGGGGAGCCAAAC | 3261 | GTTTGGCTCCCCCCAGGTG |
| siRNA 1520 | 1520 | ACCTGGGGGGAGCCAAACA | 3262 | TGTTTGGCTCCCCCCAGGT |
| siRNA 1521 | 1521 | CCTGGGGGGAGCCAAACAG | 3263 | CTGTTTGGCTCCCCCCAGG |
| siRNA 1522 | 1522 | CTGGGGGGAGCCAAACAGG | 3264 | CCTGTTTGGCTCCCCCCAG |
| siRNA 1523 | 1523 | TGGGGGGAGCCAAACAGGC | 3265 | GCCTGTTTGGCTCCCCCCA |
| siRNA 1524 | 1524 | GGGGGGAGCCAAACAGGCT | 3266 | AGCCTGTTTGGCTCCCCCC |
| siRNA 1525 | 1525 | GGGGGAGCCAAACAGGCTG | 3267 | CAGCCTGTTTGGCTCCCCC |
| siRNA 1526 | 1526 | GGGGAGCCAAACAGGCTGG | 3268 | CCAGCCTGTTTGGCTCCCC |
| siRNA 1527 | 1527 | GGGAGCCAAACAGGCTGGA | 3269 | TCCAGCCTGTTTGGCTCCC |
| siRNA 1528 | 1528 | GGAGCCAAACAGGCTGGAG | 3270 | CTCCAGCCTGTTTGGCTCC |
| siRNA 1529 | 1529 | GAGCCAAACAGGCTGGAGA | 3271 | TCTCCAGCCTGTTTGGCTC |
| siRNA 1530 | 1530 | AGCCAAACAGGCTGGAGAC | 3272 | GTCTCCAGCCTGTTTGGCT |
| siRNA 1531 | 1531 | GCCAAACAGGCTGGAGACG | 3273 | CGTCTCCAGCCTGTTTGGC |
| siRNA 1532 | 1532 | CCAAACAGGCTGGAGACGT | 3274 | ACGTCTCCAGCCTGTTTGG |
| siRNA 1533 | 1533 | CAAACAGGCTGGAGACGTT | 3275 | AACGTCTCCAGCCTGTTTG |
| siRNA 1534 | 1534 | AAACAGGCTGGAGACGTTT | 3276 | AAACGTCTCCAGCCTGTTT |
| siRNA 1535 | 1535 | AACAGGCTGGAGACGTTTA | 3277 | TAAACGTCTCCAGCCTGTT |
| siRNA 1536 | 1536 | ACAGGCTGGAGACGTTTAA | 3278 | TTAAACGTCTCCAGCCTGT |
| siRNA 1537 | 1537 | CAGGCTGGAGACGTTTAAA | 3279 | TTTAAACGTCTCCAGCCTG |
| siRNA 1538 | 1538 | AGGCTGGAGACGTTTAAAA | 3280 | TTTTAAACGTCTCCAGCCT |
| siRNA 1539 | 1539 | GGCTGGAGACGTTTAAAAG | 3281 | CTTTTAAACGTCTCCAGCC |
| siRNA 1540 | 1540 | GCTGGAGACGTTTAAAAGA | 3282 | TCTTTTAAACGTCTCCAGC |
| siRNA 1541 | 1541 | CTGGAGACGTTTAAAAGAC | 3283 | GTCTTTTAAACGTCTCCAG |
| siRNA 1542 | 1542 | TGGAGACGTTTAAAAGACC | 3284 | GGTCTTTTAAACGTCTCCA |
| siRNA 1543 | 1543 | GGAGACGTTTAAAAGACCG | 3285 | CGGTCTTTTAAACGTCTCC |
| siRNA 1544 | 1544 | GAGACGTTTAAAAGACCGT | 3286 | ACGGTCTTTTAAACGTCTC |
| siRNA 1545 | 1545 | AGACGTTTAAAAGACCGTT | 3287 | AACGGTCTTTTAAACGTCT |
| siRNA 1546 | 1546 | GACGTTTAAAAGACCGTTT | 3288 | AAACGGTCTTTTAAACGTC |
| siRNA 1547 | 1547 | ACGTTTAAAAGACCGTTTC | 3289 | GAAACGGTCTTTTAAACGT |
| siRNA 1548 | 1548 | CGTTTAAAAGACCGTTTCA | 3290 | TGAAACGGTCTTTTAAACG |
| siRNA 1549 | 1549 | GTTTAAAAGACCGTTTCAA | 3291 | TTGAAACGGTCTTTTAAAC |
| siRNA 1550 | 1550 | TTTAAAAGACCGTTTCAAA | 3292 | TTTGAAACGGTCTTTTAAA |
| siRNA 1551 | 1551 | TTAAAAGACCGTTTCAAAA | 3293 | TTTTGAAACGGTCTTTTAA |
| siRNA 1552 | 1552 | TAAAAGACCGTTTCAAAAG | 3294 | CTTTTGAAACGGTCTTTTA |
| siRNA 1553 | 1553 | AAAAGACCGTTTCAAAAGA | 3295 | TCTTTTGAAACGGTCTTTT |
| siRNA 1554 | 1554 | AAAGACCGTTTCAAAAGAG | 3296 | CTCTTTTGAAACGGTCTTT |
| siRNA 1555 | 1555 | AAGACCGTTTCAAAAGAGA | 3297 | TCTCTTTTGAAACGGTCTT |
| siRNA 1556 | 1556 | AGACCGTTTCAAAAGAGAT | 3298 | ATCTCTTTTGAAACGGTCT |
| siRNA 1557 | 1557 | GACCGTTTCAAAAGAGATT | 3299 | AATCTCTTTTGAAACGGTC |
| siRNA 1558 | 1558 | ACCGTTTCAAAAGAGATTT | 3300 | AAATCTCTTTTGAAACGGT |
| siRNA 1559 | 1559 | CCGTTTCAAAAGAGATTTA | 3301 | TAAATCTCTTTTGAAACGG |
| siRNA 1560 | 1560 | CGTTTCAAAAGAGATTTAC | 3302 | GTAAATCTCTTTTGAAACG |
| siRNA 1561 | 1561 | GTTTCAAAAGAGATTTACT | 3303 | AGTAAATCTCTTTTGAAAC |
| siRNA 1562 | 1562 | TTTCAAAAGAGATTTACTT | 3304 | AAGTAAATCTCTTTTGAAA |
| siRNA 1563 | 1563 | TTCAAAAGAGATTTACTTT | 3305 | AAAGTAAATCTCTTTTGAA |
| siRNA 1564 | 1564 | TCAAAAGAGATTTACTTTT | 3306 | AAAAGTAAATCTCTTTTGA |
| siRNA 1565 | 1565 | CAAAAGAGATTTACTTTTT | 3307 | AAAAAGTAAATCTCTTTTG |
| siRNA 1566 | 1566 | AAAAGAGATTTACTTTTTT | 3308 | AAAAAAGTAAATCTCTTTT |
| siRNA 1567 | 1567 | AAAGAGATTTACTTTTTTA | 3309 | TAAAAAAGTAAATCTCTTT |
| siRNA 1568 | 1568 | AAGAGATTTACTTTTTTAA | 3310 | TTAAAAAAGTAAATCTCTT |
| siRNA 1569 | 1569 | AGAGATTTACTTTTTTAAA | 3311 | TTTAAAAAAGTAAATCTCT |
| siRNA 1570 | 1570 | GAGATTTACTTTTTTAAAG | 3312 | CTTTAAAAAAGTAAATCTC |
| siRNA 1571 | 1571 | AGATTTACTTTTTTAAAGG | 3313 | CCTTTAAAAAAGTAAATCT |
| siRNA 1572 | 1572 | GATTTACTTTTTTAAAGGA | 3314 | TCCTTTAAAAAAGTAAATC |
| siRNA 1573 | 1573 | ATTTACTTTTTTAAAGGAC | 3315 | GTCCTTTAAAAAAGTAAAT |
| siRNA 1574 | 1574 | TTTACTTTTTTAAAGGACT | 3316 | AGTCCTTTAAAAAAGTAAA |
| siRNA 1575 | 1575 | TTACTTTTTTAAAGGACTT | 3317 | AAGTCCTTTAAAAAAGTAA |
| siRNA 1576 | 1576 | TACTTTTTTAAAGGACTTT | 3318 | AAAGTCCTTTAAAAAAGTA |
| siRNA 1577 | 1577 | ACTTTTTTAAAGGACTTTA | 3319 | TAAAGTCCTTTAAAAAAGT |
| siRNA 1578 | 1578 | CTTTTTTAAAGGACTTTAT | 3320 | ATAAAGTCCTTTAAAAAAG |
| siRNA 1579 | 1579 | TTTTTTAAAGGACTTTATC | 3321 | GATAAAGTCCTTTAAAAAA |
| siRNA 1580 | 1580 | TTTTTAAAGGACTTTATCT | 3322 | AGATAAAGTCCTTTAAAAA |
| siRNA 1581 | 1581 | TTTTAAAGGACTTTATCTG | 3323 | CAGATAAAGTCCTTTAAAA |
| siRNA 1582 | 1582 | TTTAAAGGACTTTATCTGA | 3324 | TCAGATAAAGTCCTTTAAA |
| siRNA 1583 | 1583 | TTAAAGGACTTTATCTGAA | 3325 | TTCAGATAAAGTCCTTTAA |
| siRNA 1584 | 1584 | TAAAGGACTTTATCTGAAC | 3326 | GTTCAGATAAAGTCCTTTA |
| siRNA 1585 | 1585 | AAAGGACTTTATCTGAACA | 3327 | TGTTCAGATAAAGTCCTTT |
| siRNA 1586 | 1586 | AAGGACTTTATCTGAACAG | 3328 | CTGTTCAGATAAAGTCCTT |
| siRNA 1587 | 1587 | AGGACTTTATCTGAACAGA | 3329 | TCTGTTCAGATAAAGTCCT |
| siRNA 1588 | 1588 | GGACTTTATCTGAACAGAG | 3330 | CTCTGTTCAGATAAAGTCC |
| siRNA 1589 | 1589 | GACTTTATCTGAACAGAGA | 3331 | TCTCTGTTCAGATAAAGTC |
| siRNA 1590 | 1590 | ACTTTATCTGAACAGAGAG | 3332 | CTCTCTGTTCAGATAAAGT |
| siRNA 1591 | 1591 | CTTTATCTGAACAGAGAGA | 3333 | TCTCTCTGTTCAGATAAAG |
| siRNA 1592 | 1592 | TTTATCTGAACAGAGAGAT | 3334 | ATCTCTCTGTTCAGATAAA |
| siRNA 1593 | 1593 | TTATCTGAACAGAGAGATA | 3335 | TATCTCTCTGTTCAGATAA |
| siRNA 1594 | 1594 | TATCTGAACAGAGAGATAT | 3336 | ATATCTCTCTGTTCAGATA |
| siRNA 1595 | 1595 | ATCTGAACAGAGAGATATA | 3337 | TATATCTCTCTGTTCAGAT |
| siRNA 1596 | 1596 | TCTGAACAGAGAGATATAA | 3338 | TTATATCTCTCTGTTCAGA |
| siRNA 1597 | 1597 | CTGAACAGAGAGATATAAT | 3339 | ATTATATCTCTCTGTTCAG |
| siRNA 1598 | 1598 | TGAACAGAGAGATATAATA | 3340 | TATTATATCTCTCTGTTCA |
| siRNA 1599 | 1599 | GAACAGAGAGATATAATAT | 3341 | ATATTATATCTCTCTGTTC |
| siRNA 1600 | 1600 | AACAGAGAGATATAATATT | 3342 | AATATTATATCTCTCTGTT |
| siRNA 1601 | 1601 | ACAGAGAGATATAATATTT | 3343 | AAATATTATATCTCTCTGT |
| siRNA 1602 | 1602 | CAGAGAGATATAATATTTT | 3344 | AAAATATTATATCTCTCTG |
| siRNA 1603 | 1603 | AGAGAGATATAATATTTTT | 3345 | AAAAATATTATATCTCTCT |
| siRNA 1604 | 1604 | GAGAGATATAATATTTTTC | 3346 | GAAAAATATTATATCTCTC |
| siRNA 1605 | 1605 | AGAGATATAATATTTTTCC | 3347 | GGAAAAATATTATATCTCT |
| siRNA 1606 | 1606 | GAGATATAATATTTTTCCT | 3348 | AGGAAAAATATTATATCTC |
| siRNA 1607 | 1607 | AGATATAATATTTTTCCTA | 3349 | TAGGAAAAATATTATATCT |
| siRNA 1608 | 1608 | GATATAATATTTTTCCTAT | 3350 | ATAGGAAAAATATTATATC |
| siRNA 1609 | 1609 | ATATAATATTTTTCCTATT | 3351 | AATAGGAAAAATATTATAT |
| siRNA 1610 | 1610 | TATAATATTTTTCCTATTG | 3352 | CAATAGGAAAAATATTATA |
| siRNA 1611 | 1611 | ATAATATTTTTCCTATTGG | 3353 | CCAATAGGAAAAATATTAT |
| siRNA 1612 | 1612 | TAATATTTTTCCTATTGGA | 3354 | TCCAATAGGAAAAATATTA |
| siRNA 1613 | 1613 | AATATTTTTCCTATTGGAC | 3355 | GTCCAATAGGAAAAATATT |
| siRNA 1614 | 1614 | ATATTTTTCCTATTGGACA | 3356 | TGTCCAATAGGAAAAATAT |
| siRNA 1615 | 1615 | TATTTTTCCTATTGGACAA | 3357 | TTGTCCAATAGGAAAAATA |
| siRNA 1616 | 1616 | ATTTTTCCTATTGGACAAT | 3358 | ATTGTCCAATAGGAAAAAT |
| siRNA 1617 | 1617 | TTTTTCCTATTGGACAATG | 3359 | CATTGTCCAATAGGAAAAA |
| siRNA 1618 | 1618 | TTTTCCTATTGGACAATGG | 3360 | CCATTGTCCAATAGGAAAA |
| siRNA 1619 | 1619 | TTTCCTATTGGACAATGGA | 3361 | TCCATTGTCCAATAGGAAA |
| siRNA 1620 | 1620 | TTCCTATTGGACAATGGAC | 3362 | GTCCATTGTCCAATAGGAA |
| siRNA 1621 | 1621 | TCCTATTGGACAATGGACT | 3363 | AGTCCATTGTCCAATAGGA |
| siRNA 1622 | 1622 | CCTATTGGACAATGGACTT | 3364 | AAGTCCATTGTCCAATAGG |
| siRNA 1623 | 1623 | CTATTGGACAATGGACTTG | 3365 | CAAGTCCATTGTCCAATAG |
| siRNA 1624 | 1624 | TATTGGACAATGGACTTGC | 3366 | GCAAGTCCATTGTCCAATA |
| siRNA 1625 | 1625 | ATTGGACAATGGACTTGCA | 3367 | TGCAAGTCCATTGTCCAAT |
| siRNA 1626 | 1626 | TTGGACAATGGACTTGCAA | 3368 | TTGCAAGTCCATTGTCCAA |
| siRNA 1627 | 1627 | TGGACAATGGACTTGCAAA | 3369 | TTTGCAAGTCCATTGTCCA |
| siRNA 1628 | 1628 | GGACAATGGACTTGCAAAG | 3370 | CTTTGCAAGTCCATTGTCC |
| siRNA 1629 | 1629 | GACAATGGACTTGCAAAGC | 3371 | GCTTTGCAAGTCCATTGTC |
| siRNA 1630 | 1630 | ACAATGGACTTGCAAAGCT | 3372 | AGCTTTGCAAGTCCATTGT |
| siRNA 1631 | 1631 | CAATGGACTTGCAAAGCTT | 3373 | AAGCTTTGCAAGTCCATTG |
| siRNA 1632 | 1632 | AATGGACTTGCAAAGCTTC | 3374 | GAAGCTTTGCAAGTCCATT |
| siRNA 1633 | 1633 | ATGGACTTGCAAAGCTTCA | 3375 | TGAAGCTTTGCAAGTCCAT |
| siRNA 1634 | 1634 | TGGACTTGCAAAGCTTCAC | 3376 | GTGAAGCTTTGCAAGTCCA |
| siRNA 1635 | 1635 | GGACTTGCAAAGCTTCACT | 3377 | AGTGAAGCTTTGCAAGTCC |
| siRNA 1636 | 1636 | GACTTGCAAAGCTTCACTT | 3378 | AAGTGAAGCTTTGCAAGTC |
| siRNA 1637 | 1637 | ACTTGCAAAGCTTCACTTC | 3379 | GAAGTGAAGCTTTGCAAGT |
| siRNA 1638 | 1638 | CTTGCAAAGCTTCACTTCA | 3380 | TGAAGTGAAGCTTTGCAAG |
| siRNA 1639 | 1639 | TTGCAAAGCTTCACTTCAT | 3381 | ATGAAGTGAAGCTTTGCAA |
| siRNA 1640 | 1640 | TGCAAAGCTTCACTTCATT | 3382 | AATGAAGTGAAGCTTTGCA |
| siRNA 1641 | 1641 | GCAAAGCTTCACTTCATTT | 3383 | AAATGAAGTGAAGCTTTGC |
| siRNA 1642 | 1642 | CAAAGCTTCACTTCATTTT | 3384 | AAAATGAAGTGAAGCTTTG |
| siRNA 1643 | 1643 | AAAGCTTCACTTCATTTTA | 3385 | TAAAATGAAGTGAAGCTTT |
| siRNA 1644 | 1644 | AAGCTTCACTTCATTTTAA | 3386 | TTAAAATGAAGTGAAGCTT |
| siRNA 1645 | 1645 | AGCTTCACTTCATTTTAAG | 3387 | CTTAAAATGAAGTGAAGCT |
| siRNA 1646 | 1646 | GCTTCACTTCATTTTAAGA | 3388 | TCTTAAAATGAAGTGAAGC |
| siRNA 1647 | 1647 | CTTCACTTCATTTTAAGAG | 3389 | CTCTTAAAATGAAGTGAAG |
| siRNA 1648 | 1648 | TTCACTTCATTTTAAGAGC | 3390 | GCTCTTAAAATGAAGTGAA |
| siRNA 1649 | 1649 | TCACTTCATTTTAAGAGCA | 3391 | TGCTCTTAAAATGAAGTGA |
| siRNA 1650 | 1650 | CACTTCATTTTAAGAGCAA | 3392 | TTGCTCTTAAAATGAAGTG |
| siRNA 1651 | 1651 | ACTTCATTTTAAGAGCAAA | 3393 | TTTGCTCTTAAAATGAAGT |
| siRNA 1652 | 1652 | CTTCATTTTAAGAGCAAAA | 3394 | TTTTGCTCTTAAAATGAAG |
| siRNA 1653 | 1653 | TTCATTTTAAGAGCAAAAG | 3395 | CTTTTGCTCTTAAAATGAA |
| siRNA 1654 | 1654 | TCATTTTAAGAGCAAAAGA | 3396 | TCTTTTGCTCTTAAAATGA |
| siRNA 1655 | 1655 | CATTTTAAGAGCAAAAGAC | 3397 | GTCTTTTGCTCTTAAAATG |
| siRNA 1656 | 1656 | ATTTTAAGAGCAAAAGACC | 3398 | GGTCTTTTGCTCTTAAAAT |
| siRNA 1657 | 1657 | TTTTAAGAGCAAAAGACCC | 3399 | GGGTCTTTTGCTCTTAAAA |
| siRNA 1658 | 1658 | TTTAAGAGCAAAAGACCCC | 3400 | GGGGTCTTTTGCTCTTAAA |
| siRNA 1659 | 1659 | TTAAGAGCAAAAGACCCCA | 3401 | TGGGGTCTTTTGCTCTTAA |
| siRNA 1660 | 1660 | TAAGAGCAAAAGACCCCAT | 3402 | ATGGGGTCTTTTGCTCTTA |
| siRNA 1661 | 1661 | AAGAGCAAAAGACCCCATG | 3403 | CATGGGGTCTTTTGCTCTT |
| siRNA 1662 | 1662 | AGAGCAAAAGACCCCATGT | 3404 | ACATGGGGTCTTTTGCTCT |
| siRNA 1663 | 1663 | GAGCAAAAGACCCCATGTT | 3405 | AACATGGGGTCTTTTGCTC |
| siRNA 1664 | 1664 | AGCAAAAGACCCCATGTTG | 3406 | CAACATGGGGTCTTTTGCT |
| siRNA 1665 | 1665 | GCAAAAGACCCCATGTTGA | 3407 | TCAACATGGGGTCTTTTGC |
| siRNA 1666 | 1666 | CAAAAGACCCCATGTTGAA | 3408 | TTCAACATGGGGTCTTTTG |
| siRNA 1667 | 1667 | AAAAGACCCCATGTTGAAA | 3409 | TTTCAACATGGGGTCTTTT |
| siRNA 1668 | 1668 | AAAGACCCCATGTTGAAAA | 3410 | TTTTCAACATGGGGTCTTT |
| siRNA 1669 | 1669 | AAGACCCCATGTTGAAAAC | 3411 | GTTTTCAACATGGGGTCTT |
| siRNA 1670 | 1670 | AGACCCCATGTTGAAAACT | 3412 | AGTTTTCAACATGGGGTCT |
| siRNA 1671 | 1671 | GACCCCATGTTGAAAACTC | 3413 | GAGTTTTCAACATGGGGTC |
| siRNA 1672 | 1672 | ACCCCATGTTGAAAACTCC | 3414 | GGAGTTTTCAACATGGGGT |
| siRNA 1673 | 1673 | CCCCATGTTGAAAACTCCA | 3415 | TGGAGTTTTCAACATGGGG |
| siRNA 1674 | 1674 | CCCATGTTGAAAACTCCAT | 3416 | ATGGAGTTTTCAACATGGG |
| siRNA 1675 | 1675 | CCATGTTGAAAACTCCATA | 3417 | TATGGAGTTTTCAACATGG |
| siRNA 1676 | 1676 | CATGTTGAAAACTCCATAA | 3418 | TTATGGAGTTTTCAACATG |
| siRNA 1677 | 1677 | ATGTTGAAAACTCCATAAC | 3419 | GTTATGGAGTTTTCAACAT |
| siRNA 1678 | 1678 | TGTTGAAAACTCCATAACA | 3420 | TGTTATGGAGTTTTCAACA |
| siRNA 1679 | 1679 | GTTGAAAACTCCATAACAG | 3421 | CTGTTATGGAGTTTTCAAC |
| siRNA 1680 | 1680 | TTGAAAACTCCATAACAGT | 3422 | ACTGTTATGGAGTTTTCAA |
| siRNA 1681 | 1681 | TGAAAACTCCATAACAGTT | 3423 | AACTGTTATGGAGTTTTCA |
| siRNA 1682 | 1682 | GAAAACTCCATAACAGTTT | 3424 | AAACTGTTATGGAGTTTTC |
| siRNA 1683 | 1683 | AAAACTCCATAACAGTTTT | 3425 | AAAACTGTTATGGAGTTTT |
| siRNA 1684 | 1684 | AAACTCCATAACAGTTTTA | 3426 | TAAAACTGTTATGGAGTTT |
| siRNA 1685 | 1685 | AACTCCATAACAGTTTTAT | 3427 | ATAAAACTGTTATGGAGTT |
| siRNA 1686 | 1686 | ACTCCATAACAGTTTTATG | 3428 | CATAAAACTGTTATGGAGT |
| siRNA 1687 | 1687 | CTCCATAACAGTTTTATGC | 3429 | GCATAAAACTGTTATGGAG |
| siRNA 1688 | 1688 | TCCATAACAGTTTTATGCT | 3430 | AGCATAAAACTGTTATGGA |
| siRNA 1689 | 1689 | CCATAACAGTTTTATGCTG | 3431 | CAGCATAAAACTGTTATGG |
| siRNA 1690 | 1690 | CATAACAGTTTTATGCTGA | 3432 | TCAGCATAAAACTGTTATG |
| siRNA 1691 | 1691 | ATAACAGTTTTATGCTGAT | 3433 | ATCAGCATAAAACTGTTAT |
| siRNA 1692 | 1692 | TAACAGTTTTATGCTGATG | 3434 | CATCAGCATAAAACTGTTA |
| siRNA 1693 | 1693 | AACAGTTTTATGCTGATGA | 3435 | TCATCAGCATAAAACTGTT |
| siRNA 1694 | 1694 | ACAGTTTTATGCTGATGAT | 3436 | ATCATCAGCATAAAACTGT |
| siRNA 1695 | 1695 | CAGTTTTATGCTGATGATA | 3437 | TATCATCAGCATAAAACTG |
| siRNA 1696 | 1696 | AGTTTTATGCTGATGATAA | 3438 | TTATCATCAGCATAAAACT |
| siRNA 1697 | 1697 | GTTTTATGCTGATGATAAT | 3439 | ATTATCATCAGCATAAAAC |
| siRNA 1698 | 1698 | TTTTATGCTGATGATAATT | 3440 | AATTATCATCAGCATAAAA |
| siRNA 1699 | 1699 | TTTATGCTGATGATAATTT | 3441 | AAATTATCATCAGCATAAA |
| siRNA 1700 | 1700 | TTATGCTGATGATAATTTA | 3442 | TAAATTATCATCAGCATAA |
| siRNA 1701 | 1701 | TATGCTGATGATAATTTAT | 3443 | ATAAATTATCATCAGCATA |
| siRNA 1702 | 1702 | ATGCTGATGATAATTTATC | 3444 | GATAAATTATCATCAGCAT |
| siRNA 1703 | 1703 | TGCTGATGATAATTTATCT | 3445 | AGATAAATTATCATCAGCA |
| siRNA 1704 | 1704 | GCTGATGATAATTTATCTA | 3446 | TAGATAAATTATCATCAGC |
| siRNA 1705 | 1705 | CTGATGATAATTTATCTAC | 3447 | GTAGATAAATTATCATCAG |
| siRNA 1706 | 1706 | TGATGATAATTTATCTACA | 3448 | TGTAGATAAATTATCATCA |
| siRNA 1707 | 1707 | GATGATAATTTATCTACAT | 3449 | ATGTAGATAAATTATCATC |
| siRNA 1708 | 1708 | ATGATAATTTATCTACATG | 3450 | CATGTAGATAAATTATCAT |
| siRNA 1709 | 1709 | TGATAATTTATCTACATGC | 3451 | GCATGTAGATAAATTATCA |
| siRNA 1710 | 1710 | GATAATTTATCTACATGCA | 3452 | TGCATGTAGATAAATTATC |
| siRNA 1711 | 1711 | ATAATTTATCTACATGCAT | 3453 | ATGCATGTAGATAAATTAT |
| siRNA 1712 | 1712 | TAATTTATCTACATGCATT | 3454 | AATGCATGTAGATAAATTA |
| siRNA 1713 | 1713 | AATTTATCTACATGCATTT | 3455 | AAATGCATGTAGATAAATT |
| siRNA 1714 | 1714 | ATTTATCTACATGCATTTC | 3456 | GAAATGCATGTAGATAAAT |
| siRNA 1715 | 1715 | TTTATCTACATGCATTTCA | 3457 | TGAAATGCATGTAGATAAA |
| siRNA 1716 | 1716 | TTATCTACATGCATTTCAA | 3458 | TTGAAATGCATGTAGATAA |
| siRNA 1717 | 1717 | TATCTACATGCATTTCAAT | 3459 | ATTGAAATGCATGTAGATA |
| siRNA 1718 | 1718 | ATCTACATGCATTTCAATA | 3460 | TATTGAAATGCATGTAGAT |
| siRNA 1719 | 1719 | TCTACATGCATTTCAATAA | 3461 | TTATTGAAATGCATGTAGA |
| siRNA 1720 | 1720 | CTACATGCATTTCAATAAA | 3462 | TTTATTGAAATGCATGTAG |
| siRNA 1721 | 1721 | TACATGCATTTCAATAAAC | 3463 | GTTTATTGAAATGCATGTA |
| siRNA 1722 | 1722 | ACATGCATTTCAATAAACC | 3464 | GGTTTATTGAAATGCATGT |
| siRNA 1723 | 1723 | CATGCATTTCAATAAACCT | 3465 | AGGTTTATTGAAATGCATG |
| siRNA 1724 | 1724 | ATGCATTTCAATAAACCTT | 3466 | AAGGTTTATTGAAATGCAT |
| siRNA 1725 | 1725 | TGCATTTCAATAAACCTTT | 3467 | AAAGGTTTATTGAAATGCA |
| siRNA 1726 | 1726 | GCATTTCAATAAACCTTTT | 3468 | AAAAGGTTTATTGAAATGC |
| siRNA 1727 | 1727 | CATTTCAATAAACCTTTTG | 3469 | CAAAAGGTTTATTGAAATG |
| siRNA 1728 | 1728 | ATTTCAATAAACCTTTTGT | 3470 | ACAAAAGGTTTATTGAAAT |
| siRNA 1729 | 1729 | TTTCAATAAACCTTTTGTT | 3471 | AACAAAAGGTTTATTGAAA |
| siRNA 1730 | 1730 | TTCAATAAACCTTTTGTTT | 3472 | AAACAAAAGGTTTATTGAA |
| siRNA 1731 | 1731 | TCAATAAACCTTTTGTTTC | 3473 | GAAACAAAAGGTTTATTGA |
| siRNA 1732 | 1732 | CAATAAACCTTTTGTTTCC | 3474 | GGAAACAAAAGGTTTATTG |
| siRNA 1733 | 1733 | AATAAACCTTTTGTTTCCT | 3475 | AGGAAACAAAAGGTTTATT |
| siRNA 1734 | 1734 | ATAAACCTTTTGTTTCCTA | 3476 | TAGGAAACAAAAGGTTTAT |
| siRNA 1735 | 1735 | TAAACCTTTTGTTTCCTAA | 3477 | TTAGGAAACAAAAGGTTTA |
| siRNA 1736 | 1736 | AAACCTTTTGTTTCCTAAG | 3478 | CTTAGGAAACAAAAGGTTT |
| siRNA 1737 | 1737 | AACCTTTTGTTTCCTAAGA | 3479 | TCTTAGGAAACAAAAGGTT |
| siRNA 1738 | 1738 | ACCTTTTGTTTCCTAAGAC | 3480 | GTCTTAGGAAACAAAAGGT |
| siRNA 1739 | 1739 | CCTTTTGTTTCCTAAGACT | 3481 | AGTCTTAGGAAACAAAAGG |
| siRNA 1740 | 1740 | CTTTTGTTTCCTAAGACTA | 3482 | TAGTCTTAGGAAACAAAAG |
| siRNA 1741 | 1741 | TTTTGTTTCCTAAGACTAG | 3483 | CTAGTCTTAGGAAACAAAA |
| siRNA 1742 | 1742 | TTTGTTTCCTAAGACTAGA | 3484 | TCTAGTCTTAGGAAACAAA |

TABLE 80
Additional Sequences

| SEQ ID | |
|---|---|
| NO: | 5′ to 3′ Sequence |
| 3621 | AAAAAGGAGGAGCTTCAACCTGTGTGCAAAATCTGGGAACCTGACAGTATAGGTTG |
| | GGGGCCAGGATGAGGAAAAAGGAACGGGAAAGACCTGCCCACCCTTCTGGTAAGG |
| | AGGCCCCGTGATCAGCTCCAGCCATTTGCAGTCCTGGCTATCCCAGGAGCTTACATA |
| | AAGGGACAATTGGAGCCTGAGAGGTGACAGTGCTGACACTACAAGGCTCGGAGCT |
| | CCGGGCACTCAGACATCATGAGTTGGTCCTTGCACCCCCGGAATTTAATTCTCTACT |
| | TCTATGCTCTTTTATTTCTCTCTTCAACATGTGTAGCATATGTTGCTACCAGAGACAA |
| | CTGCTGCATCTTAGATGAAAGATTCGGTAGTTATTGTCCAACTACCTGTGGCATTGC |
| | AGATTTCCTGTCTACTTATCAAACCAAAGTAGACAAGGATCTACAGTCTTTGGAAG |
| | ACATCTTACATCAAGTTGAAAACAAAACATCAGAAGTCAAACAGCTGATAAAAGC |
| | AATCCAACTCACTTATAATCCTGATGAATCATCAAAACCAAATATGATAGACGCTG |
| | CTACTTTGAAGTCCAGGAAAATGTTAGAAGAAATTATGAAATATGAAGCATCGATT |
| | TTAACACATGACTCAAGTATTCGATATTTGCAGGAAATATATAATTCAAATAATCA |
| | AAAGATTGTTAACCTGAAAGAGAAGGTAGCCCAGCTTGAAGCACAGTGCCAGGAA |
| | CCTTGCAAAGACACGGTGCAAATCCATGATATCACTGGGAAAGATTGTCAAGACAT |
| | TGCCAATAAGGGAGCTAAACAGAGCGGGCTTTACTTTATTAAACCTCTGAAAGCTA |
| | ACCAGCAATTCTTAGTCTACTGTGAAATCGATGGGTCTGGAAATGGATGGACTGTG |
| | TTTCAGAAGAGACTTGATGGCAGTGTAGATTTCAAGAAAAACTGGATTCAATATAA |
| | AGAAGGATTTGGACATCTGTCTCCTACTGGCACAACAGAATTTTGGCTGGGAAATG |
| | AGAAGATTCATTTGATAAGCACACAGTCTGCCATCCCATATGCATTAAGAGTGGAA |
| | CTGGAAGACTGGAATGGCAGAACCAGTACTGCAGACTATGCCATGTTCAAGGTGGG |
| | ACCTGAAGCTGACAAGTACCGCCTAACATATGCCTACTTCGCTGGTGGGGATGCTG |
| | GAGATGCCTTTGATGGCTTTGATTTTGGCGATGATCCTAGTGACAAGTTTTTCACAT |
| | CCCATAATGGCATGCAGTTCAGTACCTGGGACAATGACAATGATAAGTTTGAAGGC |
| | AACTGTGCTGAACAGGATGGATCTGGTTGGTGGATGAACAAGTGTCACGCTGGCCA |
| | TCTCAATGGAGTTTATTACCAAGGTGGCACTTACTCAAAAGCATCTACTCCTAATGG |
| | TTATGATAATGGCATTATTTGGGCCACTTGGAAAACCCGGTGGTATTCCATGAAGA |
| | AAACCACTATGAAGATAATCCCATTCAACAGACTCACAATTGGAGAAGGACAGCA |
| | ACACCACCTGGGGGGAGCCAAACAGGCTGGAGACGTTTAAAAGACCGTTTCAAAA |
| | GAGATTTACTTTTTTAAAGGACTTTATCTGAACAGAGAGATATAATATTTTTCCTAT |
| | TGGACAATGGACTTGCAAAGCTTCACTTCATTTTAAGAGCAAAAGACCCCATGTTG |
| | AAAACTCCATAACAGTTTTATGCTGATGATAATTTATCTACATGCATTTCAATAAAC |
| | CTTTTGTTTCCTAAGACTAGA |
| 3622 | NfsnsNfnNfnNfNfNfnNfnNfnNfnNfnNfsnsn |
| 3623 | nsnsnnNfnNfNfNfnnnnnnnnnnsnsn |
| 3624 | nsnsnnNfnNfnNfnnnnnnnnnnsnsn |
| 3625 | NfsnsNfnNfnNfNfNfnNfnNfnNfnNfnNfsnsnN-moiety (e.g. a sugar moiety) |
| 3626 | nsnsnnNfnNfNfNfnnnnnnnnnnsnsnN-moiety (e.g. sugar moiety) |
| 3627 | NfsnsNfnNfnNfnNfnNfnNfnNfnNfnNfsnsn |
| 3628 | nsnsnnNfNfNfNfNfnnnnnnnnnnsnsn |
| 3629 | nsnsnnnNfNfNfNfnnnnnnnnnnsnsn |
| 3630 | nsnsnnnnNfNfNfNfnnnnnnnnnsnsn |
| 3631 | nsNfsnNfnNfnNfnNfnnnNfnNfnNfnsnsn |
| 3632 | nsNfsnnnNfnNfNfnnnnNfnNfnnnsnsn |
| 3633 | nsNfsnnnNfnnnnnnnNfnNfnnnsnsn |
| 3634 | nsNfsnNfnNfnnnnnnnNfnNfnnnsnsn |
| 3635 | nsNfsnnnnnnnnnnnNfnNfnnnsnsn |
| 3636 | nsNfsnnnNfnnNfnnnnNfnNfnnnsnsn |
| 3637 | nsNfsnNfnNfnNfnNfnNfnNfnNfnNfnsnsn |
| 3638 | nsNfsnnnnnnnnnnnNfnnnnnsnsn |
| 3639 | nNfnNfnNfnNfnNfnNfnNfnNfnNfnsnsn |
| 3640 | nsnsnsnsnsdNsdNsdNsdNsdNsdNsdNsdNsdNsdNsnsnsnsnsn |

TABLE 81
Modified siRNA Sequences

| | SEQ | | SEQ | |
|---|---|---|---|---|
| siRNA | ID | | ID | |
| Name | NO: | Sense strand sequence (5′-3′) | NO: | Antisense strand sequence (5′-3′) |
| siRNA 3599 | 3599 | [ETL1]gsasugaAfaGfAfuucgguaguasusu | 3595 | usAfscUfaCfcGfaAfuCfuUfuCfaUfcsusu |
| siRNA 3600 | 3600 | [ETL1]gsasugaAfAfgAfuucgguaguasusu | 3595 | usAfscUfaCfcGfaAfuCfuUfuCfaUfcsusu |
| siRNA 3601 | 3601 | [ETL1]gsasugaAfAfGfAfuucgguaguasusu | 3595 | usAfscUfaCfcGfaAfuCfuUfuCfaUfcsusu |
| siRNA 3602 | 3602 | [ETL1]gsasugAfaaGfAfuucgguaguasusu | 3595 | usAfscUfaCfcGfaAfuCfuUfuCfaUfcsusu |
| siRNA 3603 | 3603 | [ETL1]gsasugAfaAfgAfuucgguaguasusu | 3595 | usAfscUfaCfcGfaAfuCfuUfuCfaUfcsusu |
| siRNA 3604 | 3604 | [ETL1]gsasugAfAfagAfuucgguaguasusu | 3595 | usAfscUfaCfcGfaAfuCfuUfuCfaUfcsusu |
| ETD01592 | 3591 | [ETL1]gsasugAfAfaGfAfuucgguaguasusu | 3595 | usAfscUfaCfcGfaAfuCfuUfuCfaUfcsusu |
| siRNA 3605 | 3605 | [ETL1]gsasugAfAfAfGfAfuucgguaguasusu | 3595 | usAfscUfaCfcGfaAfuCfuUfuCfaUfcsusu |
| siRNA 3606 | 3606 | [ETL1]gsgsaaaugAfGfaAfgauucauasusu | 3596 | usAfsuGfaAfuCfuUfcUfcAfuUfuCfcsusu |
| siRNA 3607 | 3607 | [ETL1]gsgsaaaugAfGfAfAfgauucauasusu | 3596 | usAfsuGfaAfuCfuUfcUfcAfuUfuCfcsusu |
| siRNA 3608 | 3608 | [ETL1]gsgsaaauGfaGfaAfgauucauasusu | 3596 | usAfsuGfaAfuCfuUfcUfcAfuUfuCfcsusu |
| ETD01593 | 3592 | [ETL1]gsgsaaauGfaGfAfagauucauasusu | 3596 | usAfsuGfaAfuCfuUfcUfcAfuUfuCfcsusu |
| siRNA 3609 | 3609 | [ETL1]gsgsaaauGfAfGfAfagauucauasusu | 3596 | usAfsuGfaAfuCfuUfcUfcAfuUfuCfcsusu |
| siRNA 3610 | 3610 | [ETL1]gsgsaaauGfAfGfAfAfgauucauasusu | 3596 | usAfsuGfaAfuCfuUfcUfcAfuUfuCfcsusu |
| siRNA 3611 | 3611 | [ETL1]gsgsaaAfugaGfaAfgauucauasusu | 3596 | usAfsuGfaAfuCfuUfcUfcAfuUfuCfcsusu |
| siRNA 3612 | 3612 | [ETL1]gsgsaaAfugaGfAfagauucauasusu | 3596 | usAfsuGfaAfuCfuUfcUfcAfuUfuCfcsusu |
| siRNA 3613 | 3613 | [ETL1]gsgsaaAfugAfGfaagauucauasusu | 3596 | usAfsuGfaAfuCfuUfcUfcAfuUfuCfcsusu |
| siRNA 3614 | 3614 | [ETL1]gsgsaaAfugAfGfaAfgauucauasusu | 3596 | usAfsuGfaAfuCfuUfcUfcAfuUfuCfcsusu |
| siRNA 3615 | 3615 | [ETL1]gsgsaaAfugAfGfAfAfgauucauasusu | 3596 | usAfsuGfaAfuCfuUfcUfcAfuUfuCfcsusu |
| siRNA 3616 | 3616 | [ETL1]gsgsaaAfuGfaGfaagauucauasusu | 3596 | usAfsuGfaAfuCfuUfcUfcAfuUfuCfcsusu |
| siRNA 3617 | 3617 | [ETL1]gsgsaaAfuGfaGfaAfgauucauasusu | 3596 | usAfsuGfaAfuCfuUfcUfcAfuUfuCfcsusu |
| siRNA 3618 | 3618 | [ETL1]gsgsaaAfuGfaGfAfagauucauasusu | 3596 | usAfsuGfaAfuCfuUfcUfcAfuUfuCfcsusu |
| siRNA 3619 | 3619 | [ETL1]gsgsaaAfuGfAfGfAfagauucauasusu | 3596 | usAfsuGfaAfuCfuUfcUfcAfuUfuCfcsusu |
| ETD01594 | 3593 | [ETL1]gsasagAfuucAfuuugauaagasusu | 3597 | usCfsuUfaUfcAfaAfuGfaAfuCfuUfcsusu |
| SIRNA 3620 | 3620 | [ETL1]usasaguuuGfAfaGfgcaacugasusu | 3598 | usCfsaGfuUfgCfcUfuCfaAfaCfuUfasusu |
| ETD01595 | 3594 | [ETL1]usasaguuuGfAfAfGfgcaacugasusu | 3598 | usCfsaGfuUfgCfcUfuCfaAfaCfuUfasusu |

[ETL1] = GalNAc#1 (shown connected 5′ to the sense strand)

What is claimed is:

1. A composition comprising an oligonucleotide that targets FGG and when administered to a subject in an effective amount improves a mental disorder measurement in the subject, relative to a baseline mental disorder measurement.

2. The composition of claim 1, wherein the mental disorder comprises a psychiatric disorder.

3. The composition of claim 2, wherein the psychiatric disorder comprises a depressive disorder, post-traumatic stress disorder, mood disorder, anxiety disorder, eating disorder, substance-use disorder, bipolar disorder, personality disorder, schizophrenia, or schizoaffective disorder.

4. The composition of claim 1, wherein the mental disorder measurement comprises a Montgomery-Asberg Depression Rating Scale score, a Hamilton Depression Rating Scale score, or a measurement of an anxiety disorder, depressive disorder, eating disorder, substance-use disorder, post-traumatic stress disorder, bipolar disorder, schizophrenia, or psychosis sign or symptom.

5. The composition of claim 1, wherein the mental disorder comprises a neurological disorder.

6. The composition of claim 5, wherein the neurological disorder comprises Alzheimer's disease, dementia, delirium, cognitive decline, vascular dementia, headache, chronic pain, chronic fatigue syndrome, or motor neuron disease.

7. The composition of claim 6, wherein the mental disorder measurement comprises a measurement of cognitive function, CNS amyloid plaques, CNS tau accumulation, CSF beta-amyloid 42, CSF tau, CSF phospho-tau, Lewy bodies, CSF alpha-synuclein, or a sign or symptom of headache, migraine, chronic pain, fibromyalgia, chronic fatigue syndrome, or motor neuron disease.

8. A composition comprising an oligonucleotide that targets FGG and when administered to a subject in an effective amount decreases fibrinogen.

9. The composition of claim 8, wherein the composition decreases circulating fibrinogen.

10. The composition of claim 8, wherein the subject has a clotting or coagulation disorder.

11. The composition of claim 8, wherein the subject has a thrombophilia.

12. The composition of claim 8, wherein the subject has a venous thromboembolism.

13. The composition of any one of the preceding claims, wherein the oligonucleotide comprises a modified internucleoside linkage.

14. The composition of claim 13, wherein the modified internucleoside linkage comprises alkylphosphonate, phosphorothioate, methylphosphonate, phosphorodithioate, alkylphosphonothioate, phosphoramidate, carbamate, carbonate, phosphate triester, acetamidate, or carboxymethyl ester, or a combination thereof.

15. The composition of claim 13, wherein the modified internucleoside linkage comprises one or more phosphorothioate linkages.

16. The composition of any one of the preceding claims, wherein the oligonucleotide comprises 1, 2, 3, 4, 5, 6, 7, 8, 9, 10, 11, 12, 13, 14, 15, 16, 17, 18, 19, or 20 modified internucleoside linkages.

17. The composition of any one of the preceding claims, wherein the oligonucleotide comprises a modified nucleoside.

18. The composition of claim 17, wherein the modified nucleoside comprises a locked nucleic acid (LNA), hexitol nucleic acid (HLA), cyclohexene nucleic acid (CeNA)′ 2′-methoxyethyl′ 2′-O-alkyl′ 2′-O-allyl′ 2′-O-allyl′ 2′-fluoro, o′ 2′-deoxy, or a combination thereof.

19. The composition of claim 17, wherein the modified nucleoside comprises a LNA.

20. The composition of claim 17, wherein the modified nucleoside comprises a 2′,4′ constrained ethyl nucleic acid.

21. The composition of claim 17, wherein the modified nucleoside comprises ′2′-O-methyl nucleoside′ 2′-deoxyfluoro nucleoside′ 2′-O—N-methylacetamido′(2′-O-NMA) nucleoside, ′ 2′-O-dimethylaminoethoxyethyl′(2′-O-DMAEOE) nucleoside′ 2′-O-aminopropyl′(2′-O-AP) nucleoside, o′ 2′-ara-F, or a combination thereof.

22. The composition of claim 17, wherein the modified nucleoside comprises one or more 2′fluoro modified nucleosides.

23. The composition of claim 17, wherein the modified nucleoside comprises ′ 2′ O-alkyl modified nucleoside.

24. The composition of any one of the preceding claims, wherein the oligonucleotide comprises 1, 2, 3, 4, 5, 6, 7, 8, 9, 10, 11, 12, 13, 14, 15, 16, 17, 18, 19, 20, or 21 modified nucleosides.

25. The composition of any one of the preceding claims, wherein the oligonucleotide comprises a sugar moiety attached at a 3′ or 5′ terminus of the oligonucleotide.

26. The composition of claim 25, wherein the sugar comprises N-acetylgalactosamine (GalNAc), N-acetylglucosamine (GlcNAc), or mannose.

27. The composition of claim 25, wherein the sugar comprises GalNAc.

28. The composition of claim 27, wherein the sugar moiety comprises ETL17.

29. The composition of any one of the preceding claims, wherein the oligonucleotide comprises a small interfering RNA (siRNA) comprising a sense strand and an antisense strand.

30. The composition of claim 29, wherein the sense strand is 12-30 nucleosides in length.

31. The composition of claim 29, wherein the antisense strand is 12-30 nucleosides in length.

32. A composition comprising an oligonucleotide that inhibits the expression of FGG, wherein the oligonucleotide comprises an siRNA comprising a sense strand and an antisense strand, each strand is independently about 12-30 nucleosides in length, and at least one of the sense strand and the antisense strand comprises a nucleoside sequence comprising about 12-30 contiguous nucleosides of SEQ ID NO: 3621.

33. The composition of claim 29, wherein any one of the following is true with regard to the sense strand:
all purines comprise 2′ fluoro modified purines, and all pyrimidines comprise a mixture of 2′ fluoro and 2′-O-methyl modified pyrimidines;
all purines comprise 2′-O-methyl modified purines, and all pyrimidines comprise a mixture of 2′ fluoro and 2′-O-methyl modified pyrimidines;
all purines comprise 2′ fluoro modified purines, and all pyrimidines comprise 2′-O-methyl modified pyrimidines;
all pyrimidines comprise 2′ fluoro modified pyrimidines, and all purines comprise a mixture of 2′ fluoro and 2′-O-methyl modified purines;
all pyrimidines comprise 2′-O-methyl modified pyrimidines, and all purines comprise a mixture of 2′ fluoro and 2′-O-methyl modified purines; or
all pyrimidines comprise 2′ fluoro modified pyrimidines, and all purines comprise 2′-O-methyl modified purines.

34. The composition of claim 29, wherein the antisense strand comprises a mixture of 2′ fluoro and 2′-O-methyl modified nucleosides.

35. The composition of claim 1 or 8, wherein the oligonucleotide comprises an antisense oligonucleotide (ASO).

36. The composition of claim 30, wherein the ASO is 12-30 nucleosides in length.

37. A composition comprising an oligonucleotide that inhibits the expression of FGG, wherein the oligonucleotide comprises an ASO about 12-30 nucleosides in length and a nucleoside sequence complementary to about 12-30 contiguous nucleosides of SEQ ID NO: 3621.

38. The composition of any one of claims 1-37, further comprising a pharmaceutically acceptable carrier.

39. A method of treating a subject having a psychiatric disorder or a neurological disorder, comprising administering an effective amount of the composition of claim 38 to the subject.

40. The method of claim 39, wherein the psychiatric disorder comprises a depressive disorder, persistent depressive disorder, treatment resistant depression, a sign or symptom of depression, post-traumatic stress disorder, mood disorder, anxiety disorders, eating disorder, substance-use disorder, bipolar disorder, personality disorder, schizophrenia, or a schizoaffective disorder.

41. The method of claim 39, wherein the neurological disorder comprises Alzheimer's disease, dementia, delirium, cognitive decline, vascular dementia, headache, chronic pain, chronic fatigue syndrome, and motor neuron disease.

42. A method of treating a subject having a clotting or coagulation disorder or a thrombophilia, comprising administering an effective amount of the composition of claim 38 to the subject.

43. The method of claim 42, wherein the prothrombin time, International Normalized Ratio, or the activated partial thromboplastin time is increased compared to a baseline.

The application's sequence listing, which the Patent Office published only in electronic form, follows.

SEQUENCE LISTING (3786 sequences)

SEQ ID NO: 1 - RNA, 19 nt, synthetic construct
  source 1..19: mol_type = other RNA
aaaaaggaggagcttcaac

SEQ ID NO: 2 - RNA, 19 nt, synthetic construct
  source 1..19: mol_type = other RNA
aaaaggaggagcttcaacc

SEQ ID NO: 3 - RNA, 19 nt, synthetic construct
  source 1..19: mol_type = other RNA
aaaggaggagcttcaacct

SEQ ID NO: 4 - RNA, 19 nt, synthetic construct
  source 1..19: mol_type = other RNA
aaggaggagcttcaacctg

SEQ ID NO: 5 - RNA, 19 nt, synthetic construct
  source 1..19: mol_type = other RNA
aggaggagcttcaacctgt

SEQ ID NO: 6 - RNA, 19 nt, synthetic construct
  source 1..19: mol_type = other RNA
ggaggagcttcaacctgtg

SEQ ID NO: 7 - RNA, 19 nt, synthetic construct
  source 1..19: mol_type = other RNA
gaggagcttcaacctgtgt

SEQ ID NO: 8 - RNA, 19 nt, synthetic construct
  source 1..19: mol_type = other RNA
aggagcttcaacctgtgtg

SEQ ID NO: 9 - RNA, 19 nt, synthetic construct
  source 1..19: mol_type = other RNA
ggagcttcaacctgtgtgc

SEQ ID NO: 10 - RNA, 19 nt, synthetic construct
  source 1..19: mol_type = other RNA
gagcttcaacctgtgtgca

SEQ ID NO: 11 - RNA, 19 nt, synthetic construct
  source 1..19: mol_type = other RNA
agcttcaacctgtgtgcaa

SEQ ID NO: 12 - RNA, 19 nt, synthetic construct
  source 1..19: mol_type = other RNA
gcttcaacctgtgtgcaaa

SEQ ID NO: 13 - RNA, 19 nt, synthetic construct
  source 1..19: mol_type = other RNA
cttcaacctgtgtgcaaaa

SEQ ID NO: 14 - RNA, 19 nt, synthetic construct
  source 1..19: mol_type = other RNA
ttcaacctgtgtgcaaaat

SEQ ID NO: 15 - RNA, 19 nt, synthetic construct
  source 1..19: mol_type = other RNA
tcaacctgtgtgcaaaatc

SEQ ID NO: 16 - RNA, 19 nt, synthetic construct
  source 1..19: mol_type = other RNA
caacctgtgtgcaaaatct

SEQ ID NO: 17 - RNA, 19 nt, synthetic construct
  source 1..19: mol_type = other RNA
aacctgtgtgcaaaatctg

SEQ ID NO: 18 - RNA, 19 nt, synthetic construct
  source 1..19: mol_type = other RNA
acctgtgtgcaaaatctgg

SEQ ID NO: 19 - RNA, 19 nt, synthetic construct
  source 1..19: mol_type = other RNA
cctgtgtgcaaaatctggg

SEQ ID NO: 20 - RNA, 19 nt, synthetic construct
  source 1..19: mol_type = other RNA
ctgtgtgcaaaatctggga

SEQ ID NO: 21 - RNA, 19 nt, synthetic construct
  source 1..19: mol_type = other RNA
tgtgtgcaaaatctgggaa

SEQ ID NO: 22 - RNA, 19 nt, synthetic construct
  source 1..19: mol_type = other RNA
gtgtgcaaaatctgggaac

SEQ ID NO: 23 - RNA, 19 nt, synthetic construct
  source 1..19: mol_type = other RNA
tgtgcaaaatctgggaacc

SEQ ID NO: 24 - RNA, 19 nt, synthetic construct
  source 1..19: mol_type = other RNA
gtgcaaaatctgggaacct

SEQ ID NO: 25 - RNA, 19 nt, synthetic construct
  source 1..19: mol_type = other RNA
tgcaaaatctgggaacctg

SEQ ID NO: 26 - RNA, 19 nt, synthetic construct
  source 1..19: mol_type = other RNA
gcaaaatctgggaacctga

SEQ ID NO: 27 - RNA, 19 nt, synthetic construct
  source 1..19: mol_type = other RNA
caaaatctgggaacctgac

SEQ ID NO: 28 - RNA, 19 nt, synthetic construct
  source 1..19: mol_type = other RNA
aaaatctgggaacctgaca

SEQ ID NO: 29 - RNA, 19 nt, synthetic construct
  source 1..19: mol_type = other RNA
aaatctgggaacctgacag

SEQ ID NO: 30 - RNA, 19 nt, synthetic construct
  source 1..19: mol_type = other RNA
aatctgggaacctgacagt

SEQ ID NO: 31 - RNA, 19 nt, synthetic construct
  source 1..19: mol_type = other RNA
atctgggaacctgacagta

SEQ ID NO: 32 - RNA, 19 nt, synthetic construct
  source 1..19: mol_type = other RNA
tctgggaacctgacagtat

SEQ ID NO: 33 - RNA, 19 nt, synthetic construct
  source 1..19: mol_type = other RNA
ctgggaacctgacagtata

SEQ ID NO: 34 - RNA, 19 nt, synthetic construct
  source 1..19: mol_type = other RNA
tgggaacctgacagtatag

SEQ ID NO: 35 - RNA, 19 nt, synthetic construct
  source 1..19: mol_type = other RNA
gggaacctgacagtatagg

SEQ ID NO: 36 - RNA, 19 nt, synthetic construct
  source 1..19: mol_type = other RNA
ggaacctgacagtataggt

SEQ ID NO: 37 - RNA, 19 nt, synthetic construct
  source 1..19: mol_type = other RNA
gaacctgacagtataggtt

SEQ ID NO: 38 - RNA, 19 nt, synthetic construct
  source 1..19: mol_type = other RNA
aacctgacagtataggttg

SEQ ID NO: 39 - RNA, 19 nt, synthetic construct
  source 1..19: mol_type = other RNA
acctgacagtataggttgg

SEQ ID NO: 40 - RNA, 19 nt, synthetic construct
  source 1..19: mol_type = other RNA
cctgacagtataggttggg

SEQ ID NO: 41 - RNA, 19 nt, synthetic construct
  source 1..19: mol_type = other RNA
ctgacagtataggttgggg

SEQ ID NO: 42 - RNA, 19 nt, synthetic construct
  source 1..19: mol_type = other RNA
tgacagtataggttggggg

SEQ ID NO: 43 - RNA, 19 nt, synthetic construct
  source 1..19: mol_type = other RNA
gacagtataggttgggggc

SEQ ID NO: 44 - RNA, 19 nt, synthetic construct
  source 1..19: mol_type = other RNA
acagtataggttgggggcc

SEQ ID NO: 45 - RNA, 19 nt, synthetic construct
  source 1..19: mol_type = other RNA
cagtataggttgggggcca

SEQ ID NO: 46 - RNA, 19 nt, synthetic construct
  source 1..19: mol_type = other RNA
agtataggttgggggccag

SEQ ID NO: 47 - RNA, 19 nt, synthetic construct
  source 1..19: mol_type = other RNA
gtataggttgggggccagg

SEQ ID NO: 48 - RNA, 19 nt, synthetic construct
  source 1..19: mol_type = other RNA
tataggttgggggccagga

SEQ ID NO: 49 - RNA, 19 nt, synthetic construct
  source 1..19: mol_type = other RNA
ataggttgggggccaggat

SEQ ID NO: 50 - RNA, 19 nt, synthetic construct
  source 1..19: mol_type = other RNA
taggttgggggccaggatg

SEQ ID NO: 51 - RNA, 19 nt, synthetic construct
  source 1..19: mol_type = other RNA
aggttgggggccaggatga

SEQ ID NO: 52 - RNA, 19 nt, synthetic construct
  source 1..19: mol_type = other RNA
ggttgggggccaggatgag

SEQ ID NO: 53 - RNA, 19 nt, synthetic construct
  source 1..19: mol_type = other RNA
gttgggggccaggatgagg

SEQ ID NO: 54 - RNA, 19 nt, synthetic construct
  source 1..19: mol_type = other RNA
ttgggggccaggatgagga

SEQ ID NO: 55 - RNA, 19 nt, synthetic construct
  source 1..19: mol_type = other RNA
tgggggccaggatgaggaa

SEQ ID NO: 56 - RNA, 19 nt, synthetic construct
  source 1..19: mol_type = other RNA
gggggccaggatgaggaaa

SEQ ID NO: 57 - RNA, 19 nt, synthetic construct
  source 1..19: mol_type = other RNA
ggggccaggatgaggaaaa

SEQ ID NO: 58 - RNA, 19 nt, synthetic construct
  source 1..19: mol_type = other RNA
gggccaggatgaggaaaaa

SEQ ID NO: 59 - RNA, 19 nt, synthetic construct
  source 1..19: mol_type = other RNA
ggccaggatgaggaaaaag

SEQ ID NO: 60 - RNA, 19 nt, synthetic construct
  source 1..19: mol_type = other RNA
gccaggatgaggaaaaagg

SEQ ID NO: 61 - RNA, 19 nt, synthetic construct
  source 1..19: mol_type = other RNA
ccaggatgaggaaaaagga

SEQ ID NO: 62 - RNA, 19 nt, synthetic construct
  source 1..19: mol_type = other RNA
caggatgaggaaaaaggaa

SEQ ID NO: 63 - RNA, 19 nt, synthetic construct
  source 1..19: mol_type = other RNA
aggatgaggaaaaaggaac

SEQ ID NO: 64 - RNA, 19 nt, synthetic construct
  source 1..19: mol_type = other RNA
ggatgaggaaaaaggaacg

SEQ ID NO: 65 - RNA, 19 nt, synthetic construct
  source 1..19: mol_type = other RNA
gatgaggaaaaaggaacgg

SEQ ID NO: 66 - RNA, 19 nt, synthetic construct
  source 1..19: mol_type = other RNA
atgaggaaaaaggaacggg

SEQ ID NO: 67 - RNA, 19 nt, synthetic construct
  source 1..19: mol_type = other RNA
tgaggaaaaaggaacggga

SEQ ID NO: 68 - RNA, 19 nt, synthetic construct
  source 1..19: mol_type = other RNA
gaggaaaaaggaacgggaa

SEQ ID NO: 69 - RNA, 19 nt, synthetic construct
  source 1..19: mol_type = other RNA
aggaaaaaggaacgggaaa

SEQ ID NO: 70 - RNA, 19 nt, synthetic construct
  source 1..19: mol_type = other RNA
ggaaaaaggaacgggaaag

SEQ ID NO: 71 - RNA, 19 nt, synthetic construct
  source 1..19: mol_type = other RNA
gaaaaaggaacgggaaaga

SEQ ID NO: 72 - RNA, 19 nt, synthetic construct
  source 1..19: mol_type = other RNA
aaaaaggaacgggaaagac

SEQ ID NO: 73 - RNA, 19 nt, synthetic construct
  source 1..19: mol_type = other RNA
aaaaggaacgggaaagacc

SEQ ID NO: 74 - RNA, 19 nt, synthetic construct
  source 1..19: mol_type = other RNA
aaaggaacgggaaagacct

SEQ ID NO: 75 - RNA, 19 nt, synthetic construct
  source 1..19: mol_type = other RNA
aaggaacgggaaagacctg

SEQ ID NO: 76 - RNA, 19 nt, synthetic construct
  source 1..19: mol_type = other RNA
aggaacgggaaagacctgc

SEQ ID NO: 77 - RNA, 19 nt, synthetic construct
  source 1..19: mol_type = other RNA
ggaacgggaaagacctgcc

SEQ ID NO: 78 - RNA, 19 nt, synthetic construct
  source 1..19: mol_type = other RNA
gaacgggaaagacctgccc

SEQ ID NO: 79 - RNA, 19 nt, synthetic construct
  source 1..19: mol_type = other RNA
aacgggaaagacctgccca

SEQ ID NO: 80 - RNA, 19 nt, synthetic construct
  source 1..19: mol_type = other RNA
acgggaaagacctgcccac

SEQ ID NO: 81 - RNA, 19 nt, synthetic construct
  source 1..19: mol_type = other RNA
cgggaaagacctgcccacc

SEQ ID NO: 82 - RNA, 19 nt, synthetic construct
  source 1..19: mol_type = other RNA
gggaaagacctgcccaccc

SEQ ID NO: 83 - RNA, 19 nt, synthetic construct
  source 1..19: mol_type = other RNA
ggaaagacctgcccaccct

SEQ ID NO: 84 - RNA, 19 nt, synthetic construct
  source 1..19: mol_type = other RNA
gaaagacctgcccaccctt

SEQ ID NO: 85 - RNA, 19 nt, synthetic construct
  source 1..19: mol_type = other RNA
aaagacctgcccacccttc

SEQ ID NO: 86 - RNA, 19 nt, synthetic construct
  source 1..19: mol_type = other RNA
aagacctgcccacccttct

SEQ ID NO: 87 - RNA, 19 nt, synthetic construct
  source 1..19: mol_type = other RNA
agacctgcccacccttctg

SEQ ID NO: 88 - RNA, 19 nt, synthetic construct
  source 1..19: mol_type = other RNA
gacctgcccacccttctgg

SEQ ID NO: 89 - RNA, 19 nt, synthetic construct
  source 1..19: mol_type = other RNA
acctgcccacccttctggt

SEQ ID NO: 90 - RNA, 19 nt, synthetic construct
  source 1..19: mol_type = other RNA
cctgcccacccttctggta

SEQ ID NO: 91 - RNA, 19 nt, synthetic construct
  source 1..19: mol_type = other RNA
ctgcccacccttctggtaa

SEQ ID NO: 92 - RNA, 19 nt, synthetic construct
  source 1..19: mol_type = other RNA
tgcccacccttctggtaag

SEQ ID NO: 93 - RNA, 19 nt, synthetic construct
  source 1..19: mol_type = other RNA
gcccacccttctggtaagg

SEQ ID NO: 94 - RNA, 19 nt, synthetic construct
  source 1..19: mol_type = other RNA
cccacccttctggtaagga

SEQ ID NO: 95 - RNA, 19 nt, synthetic construct
  source 1..19: mol_type = other RNA
ccacccttctggtaaggag

SEQ ID NO: 96 - RNA, 19 nt, synthetic construct
  source 1..19: mol_type = other RNA
cacccttctggtaaggagg

SEQ ID NO: 97 - RNA, 19 nt, synthetic construct
  source 1..19: mol_type = other RNA
acccttctggtaaggaggc

SEQ ID NO: 98 - RNA, 19 nt, synthetic construct
  source 1..19: mol_type = other RNA
cccttctggtaaggaggcc

SEQ ID NO: 99 - RNA, 19 nt, synthetic construct
  source 1..19: mol_type = other RNA
ccttctggtaaggaggccc

SEQ ID NO: 100 - RNA, 19 nt, synthetic construct
  source 1..19: mol_type = other RNA
cttctggtaaggaggcccc

SEQ ID NO: 101 - RNA, 19 nt, synthetic construct
  source 1..19: mol_type = other RNA
ttctggtaaggaggccccg

SEQ ID NO: 102 - RNA, 19 nt, synthetic construct
  source 1..19: mol_type = other RNA
tctggtaaggaggccccgt

SEQ ID NO: 103 - RNA, 19 nt, synthetic construct
  source 1..19: mol_type = other RNA
ctggtaaggaggccccgtg

SEQ ID NO: 104 - RNA, 19 nt, synthetic construct
  source 1..19: mol_type = other RNA
tggtaaggaggccccgtga

SEQ ID NO: 105 - RNA, 19 nt, synthetic construct
  source 1..19: mol_type = other RNA
ggtaaggaggccccgtgat

SEQ ID NO: 106 - RNA, 19 nt, synthetic construct
  source 1..19: mol_type = other RNA
gtaaggaggccccgtgatc

SEQ ID NO: 107 - RNA, 19 nt, synthetic construct
  source 1..19: mol_type = other RNA
taaggaggccccgtgatca

SEQ ID NO: 108 - RNA, 19 nt, synthetic construct
  source 1..19: mol_type = other RNA
aaggaggccccgtgatcag

SEQ ID NO: 109 - RNA, 19 nt, synthetic construct
  source 1..19: mol_type = other RNA
aggaggccccgtgatcagc

SEQ ID NO: 110 - RNA, 19 nt, synthetic construct
  source 1..19: mol_type = other RNA
ggaggccccgtgatcagct

SEQ ID NO: 111 - RNA, 19 nt, synthetic construct
  source 1..19: mol_type = other RNA
gaggccccgtgatcagctc

SEQ ID NO: 112 - RNA, 19 nt, synthetic construct
  source 1..19: mol_type = other RNA
aggccccgtgatcagctcc

SEQ ID NO: 113 - RNA, 19 nt, synthetic construct
  source 1..19: mol_type = other RNA
ggccccgtgatcagctcca

SEQ ID NO: 114 - RNA, 19 nt, synthetic construct
  source 1..19: mol_type = other RNA
gccccgtgatcagctccag

SEQ ID NO: 115 - RNA, 19 nt, synthetic construct
  source 1..19: mol_type = other RNA
ccccgtgatcagctccagc

SEQ ID NO: 116 - RNA, 19 nt, synthetic construct
  source 1..19: mol_type = other RNA
cccgtgatcagctccagcc

SEQ ID NO: 117 - RNA, 19 nt, synthetic construct
  source 1..19: mol_type = other RNA
ccgtgatcagctccagcca

SEQ ID NO: 118 - RNA, 19 nt, synthetic construct
  source 1..19: mol_type = other RNA
cgtgatcagctccagccat

SEQ ID NO: 119 - RNA, 19 nt, synthetic construct
  source 1..19: mol_type = other RNA
gtgatcagctccagccatt

SEQ ID NO: 120 - RNA, 19 nt, synthetic construct
  source 1..19: mol_type = other RNA
tgatcagctccagccattt

SEQ ID NO: 121 - RNA, 19 nt, synthetic construct
  source 1..19: mol_type = other RNA
gatcagctccagccatttg

SEQ ID NO: 122 - RNA, 19 nt, synthetic construct
  source 1..19: mol_type = other RNA
atcagctccagccatttgc

SEQ ID NO: 123 - RNA, 19 nt, synthetic construct
  source 1..19: mol_type = other RNA
tcagctccagccatttgca

SEQ ID NO: 124 - RNA, 19 nt, synthetic construct
  source 1..19: mol_type = other RNA
cagctccagccatttgcag

SEQ ID NO: 125 - RNA, 19 nt, synthetic construct
  source 1..19: mol_type = other RNA
agctccagccatttgcagt

SEQ ID NO: 126 - RNA, 19 nt, synthetic construct
  source 1..19: mol_type = other RNA
gctccagccatttgcagtc

SEQ ID NO: 127 - RNA, 19 nt, synthetic construct
  source 1..19: mol_type = other RNA
ctccagccatttgcagtcc

SEQ ID NO: 128 - RNA, 19 nt, synthetic construct
  source 1..19: mol_type = other RNA
tccagccatttgcagtcct

SEQ ID NO: 129 - RNA, 19 nt, synthetic construct
  source 1..19: mol_type = other RNA
ccagccatttgcagtcctg

SEQ ID NO: 130 - RNA, 19 nt, synthetic construct
  source 1..19: mol_type = other RNA
cagccatttgcagtcctgg

SEQ ID NO: 131 - RNA, 19 nt, synthetic construct
  source 1..19: mol_type = other RNA
agccatttgcagtcctggc

SEQ ID NO: 132 - RNA, 19 nt, synthetic construct
  source 1..19: mol_type = other RNA
gccatttgcagtcctggct

SEQ ID NO: 133 - RNA, 19 nt, synthetic construct
  source 1..19: mol_type = other RNA
ccatttgcagtcctggcta

SEQ ID NO: 134 - RNA, 19 nt, synthetic construct
  source 1..19: mol_type = other RNA
catttgcagtcctggctat

SEQ ID NO: 135 - RNA, 19 nt, synthetic construct
  source 1..19: mol_type = other RNA
atttgcagtcctggctatc

SEQ ID NO: 136 - RNA, 19 nt, synthetic construct
  source 1..19: mol_type = other RNA
tttgcagtcctggctatcc

SEQ ID NO: 137 - RNA, 19 nt, synthetic construct
  source 1..19: mol_type = other RNA
ttgcagtcctggctatccc

SEQ ID NO: 138 - RNA, 19 nt, synthetic construct
  source 1..19: mol_type = other RNA
tgcagtcctggctatccca

SEQ ID NO: 139 - RNA, 19 nt, synthetic construct
  source 1..19: mol_type = other RNA
gcagtcctggctatcccag

SEQ ID NO: 140 - RNA, 19 nt, synthetic construct
  source 1..19: mol_type = other RNA
cagtcctggctatcccagg

SEQ ID NO: 141 - RNA, 19 nt, synthetic construct
  source 1..19: mol_type = other RNA
agtcctggctatcccagga

SEQ ID NO: 142 - RNA, 19 nt, synthetic construct
  source 1..19: mol_type = other RNA
gtcctggctatcccaggag

SEQ ID NO: 143 - RNA, 19 nt, synthetic construct
  source 1..19: mol_type = other RNA
tcctggctatcccaggagc

SEQ ID NO: 144 - RNA, 19 nt, synthetic construct
  source 1..19: mol_type = other RNA
cctggctatcccaggagct

SEQ ID NO: 145 - RNA, 19 nt, synthetic construct
  source 1..19: mol_type = other RNA
ctggctatcccaggagctt

SEQ ID NO: 146 - RNA, 19 nt, synthetic construct
  source 1..19: mol_type = other RNA
tggctatcccaggagctta

SEQ ID NO: 147 - RNA, 19 nt, synthetic construct
  source 1..19: mol_type = other RNA
ggctatcccaggagcttac

SEQ ID NO: 148 - RNA, 19 nt, synthetic construct
  source 1..19: mol_type = other RNA
gctatcccaggagcttaca

SEQ ID NO: 149 - RNA, 19 nt, synthetic construct
  source 1..19: mol_type = other RNA
ctatcccaggagcttacat

SEQ ID NO: 150 - RNA, 19 nt, synthetic construct
  source 1..19: mol_type = other RNA
tatcccaggagcttacata

SEQ ID NO: 151 - RNA, 19 nt, synthetic construct
  source 1..19: mol_type = other RNA
atcccaggagcttacataa

SEQ ID NO: 152 - RNA, 19 nt, synthetic construct
  source 1..19: mol_type = other RNA
tcccaggagcttacataaa

SEQ ID NO: 153 - RNA, 19 nt, synthetic construct
  source 1..19: mol_type = other RNA
cccaggagcttacataaag

SEQ ID NO: 154 - RNA, 19 nt, synthetic construct
  source 1..19: mol_type = other RNA
ccaggagcttacataaagg

SEQ ID NO: 155 - RNA, 19 nt, synthetic construct
  source 1..19: mol_type = other RNA
caggagcttacataaaggg

SEQ ID NO: 156 - RNA, 19 nt, synthetic construct
  source 1..19: mol_type = other RNA
aggagcttacataaaggga

SEQ ID NO: 157 - RNA, 19 nt, synthetic construct
  source 1..19: mol_type = other RNA
ggagcttacataaagggac

SEQ ID NO: 158 - RNA, 19 nt, synthetic construct
  source 1..19: mol_type = other RNA
gagcttacataaagggaca

SEQ ID NO: 159 - RNA, 19 nt, synthetic construct
  source 1..19: mol_type = other RNA
agcttacataaagggacaa

SEQ ID NO: 160 - RNA, 19 nt, synthetic construct
  source 1..19: mol_type = other RNA
gcttacataaagggacaat

SEQ ID NO: 161 - RNA, 19 nt, synthetic construct
  source 1..19: mol_type = other RNA
cttacataaagggacaatt

SEQ ID NO: 162 - RNA, 19 nt, synthetic construct
  source 1..19: mol_type = other RNA
ttacataaagggacaattg

SEQ ID NO: 163 - RNA, 19 nt, synthetic construct
  source 1..19: mol_type = other RNA
tacataaagggacaattgg

SEQ ID NO: 164 - RNA, 19 nt, synthetic construct
  source 1..19: mol_type = other RNA
acataaagggacaattgga

SEQ ID NO: 165 - RNA, 19 nt, synthetic construct
  source 1..19: mol_type = other RNA
cataaagggacaattggag

SEQ ID NO: 166 - RNA, 19 nt, synthetic construct
  source 1..19: mol_type = other RNA
ataaagggacaattggagc

SEQ ID NO: 167 - RNA, 19 nt, synthetic construct
  source 1..19: mol_type = other RNA
taaagggacaattggagcc

SEQ ID NO: 168 - RNA, 19 nt, synthetic construct
  source 1..19: mol_type = other RNA
aaagggacaattggagcct

SEQ ID NO: 169 - RNA, 19 nt, synthetic construct
  source 1..19: mol_type = other RNA
aagggacaattggagcctg

SEQ ID NO: 170 - RNA, 19 nt, synthetic construct
  source 1..19: mol_type = other RNA
agggacaattggagcctga

SEQ ID NO: 171 - RNA, 19 nt, synthetic construct
  source 1..19: mol_type = other RNA
gggacaattggagcctgag

SEQ ID NO: 172 - RNA, 19 nt, synthetic construct
  source 1..19: mol_type = other RNA
ggacaattggagcctgaga

SEQ ID NO: 173 - RNA, 19 nt, synthetic construct
  source 1..19: mol_type = other RNA
gacaattggagcctgagag

SEQ ID NO: 174 - RNA, 19 nt, synthetic construct
  source 1..19: mol_type = other RNA
acaattggagcctgagagg

SEQ ID NO: 175 - RNA, 19 nt, synthetic construct
  source 1..19: mol_type = other RNA
caattggagcctgagaggt

SEQ ID NO: 176 - RNA, 19 nt, synthetic construct
  source 1..19: mol_type = other RNA
aattggagcctgagaggtg

SEQ ID NO: 177 - RNA, 19 nt, synthetic construct
  source 1..19: mol_type = other RNA
attggagcctgagaggtga

SEQ ID NO: 178 - RNA, 19 nt, synthetic construct
  source 1..19: mol_type = other RNA
ttggagcctgagaggtgac

SEQ ID NO: 179 - RNA, 19 nt, synthetic construct
  source 1..19: mol_type = other RNA
tggagcctgagaggtgaca

SEQ ID NO: 180 - RNA, 19 nt, synthetic construct
  source 1..19: mol_type = other RNA
ggagcctgagaggtgacag

SEQ ID NO: 181 - RNA, 19 nt, synthetic construct
  source 1..19: mol_type = other RNA
gagcctgagaggtgacagt

SEQ ID NO: 182 - RNA, 19 nt, synthetic construct
  source 1..19: mol_type = other RNA
agcctgagaggtgacagtg

SEQ ID NO: 183 - RNA, 19 nt, synthetic construct
  source 1..19: mol_type = other RNA
gcctgagaggtgacagtgc

SEQ ID NO: 184 - RNA, 19 nt, synthetic construct
  source 1..19: mol_type = other RNA
cctgagaggtgacagtgct

SEQ ID NO: 185 - RNA, 19 nt, synthetic construct
  source 1..19: mol_type = other RNA
ctgagaggtgacagtgctg

SEQ ID NO: 186 - RNA, 19 nt, synthetic construct
  source 1..19: mol_type = other RNA
tgagaggtgacagtgctga

SEQ ID NO: 187 - RNA, 19 nt, synthetic construct
  source 1..19: mol_type = other RNA
gagaggtgacagtgctgac

SEQ ID NO: 188 - RNA, 19 nt, synthetic construct
  source 1..19: mol_type = other RNA
agaggtgacagtgctgaca

SEQ ID NO: 189 - RNA, 19 nt, synthetic construct
  source 1..19: mol_type = other RNA
gaggtgacagtgctgacac

SEQ ID NO: 190 - RNA, 19 nt, synthetic construct
  source 1..19: mol_type = other RNA
aggtgacagtgctgacact

SEQ ID NO: 191 - RNA, 19 nt, synthetic construct
  source 1..19: mol_type = other RNA
ggtgacagtgctgacacta

SEQ ID NO: 192 - RNA, 19 nt, synthetic construct
  source 1..19: mol_type = other RNA
gtgacagtgctgacactac

SEQ ID NO: 193 - RNA, 19 nt, synthetic construct
  source 1..19: mol_type = other RNA
tgacagtgctgacactaca

SEQ ID NO: 194 - RNA, 19 nt, synthetic construct
  source 1..19: mol_type = other RNA
gacagtgctgacactacaa

SEQ ID NO: 195 - RNA, 19 nt, synthetic construct
  source 1..19: mol_type = other RNA
acagtgctgacactacaag

SEQ ID NO: 196 - RNA, 19 nt, synthetic construct
  source 1..19: mol_type = other RNA
cagtgctgacactacaagg

SEQ ID NO: 197 - RNA, 19 nt, synthetic construct
  source 1..19: mol_type = other RNA
agtgctgacactacaaggc

SEQ ID NO: 198 - RNA, 19 nt, synthetic construct
  source 1..19: mol_type = other RNA
gtgctgacactacaaggct

SEQ ID NO: 199 - RNA, 19 nt, synthetic construct
  source 1..19: mol_type = other RNA
tgctgacactacaaggctc

SEQ ID NO: 200 - RNA, 19 nt, synthetic construct
  source 1..19: mol_type = other RNA
gctgacactacaaggctcg

SEQ ID NO: 201 - RNA, 19 nt, synthetic construct
  source 1..19: mol_type = other RNA
ctgacactacaaggctcgg

SEQ ID NO: 202 - RNA, 19 nt, synthetic construct
  source 1..19: mol_type = other RNA
tgacactacaaggctcgga

SEQ ID NO: 203 - RNA, 19 nt, synthetic construct
  source 1..19: mol_type = other RNA
gacactacaaggctcggag

SEQ ID NO: 204 - RNA, 19 nt, synthetic construct
  source 1..19: mol_type = other RNA
acactacaaggctcggagc

SEQ ID NO: 205 - RNA, 19 nt, synthetic construct
  source 1..19: mol_type = other RNA
cactacaaggctcggagct

SEQ ID NO: 206 - RNA, 19 nt, synthetic construct
  source 1..19: mol_type = other RNA
actacaaggctcggagctc

SEQ ID NO: 207 - RNA, 19 nt, synthetic construct
  source 1..19: mol_type = other RNA
ctacaaggctcggagctcc

SEQ ID NO: 208 - RNA, 19 nt, synthetic construct
  source 1..19: mol_type = other RNA
tacaaggctcggagctccg

SEQ ID NO: 209 - RNA, 19 nt, synthetic construct
  source 1..19: mol_type = other RNA
acaaggctcggagctccgg

SEQ ID NO: 210 - RNA, 19 nt, synthetic construct
  source 1..19: mol_type = other RNA
caaggctcggagctccggg

SEQ ID NO: 211 - RNA, 19 nt, synthetic construct
  source 1..19: mol_type = other RNA
aaggctcggagctccgggc

SEQ ID NO: 212 - RNA, 19 nt, synthetic construct
  source 1..19: mol_type = other RNA
aggctcggagctccgggca

SEQ ID NO: 213 - RNA, 19 nt, synthetic construct
  source 1..19: mol_type = other RNA
ggctcggagctccgggcac

SEQ ID NO: 214 - RNA, 19 nt, synthetic construct
  source 1..19: mol_type = other RNA
gctcggagctccgggcact

SEQ ID NO: 215 - RNA, 19 nt, synthetic construct
  source 1..19: mol_type = other RNA
ctcggagctccgggcactc

SEQ ID NO: 216 - RNA, 19 nt, synthetic construct
  source 1..19: mol_type = other RNA
tcggagctccgggcactca

SEQ ID NO: 217 - RNA, 19 nt, synthetic construct
  source 1..19: mol_type = other RNA
cggagctccgggcactcag

SEQ ID NO: 218 - RNA, 19 nt, synthetic construct
  source 1..19: mol_type = other RNA
ggagctccgggcactcaga

SEQ ID NO: 219 - RNA, 19 nt, synthetic construct
  source 1..19: mol_type = other RNA
gagctccgggcactcagac

SEQ ID NO: 220 - RNA, 19 nt, synthetic construct
  source 1..19: mol_type = other RNA
agctccgggcactcagaca

SEQ ID NO: 221 - RNA, 19 nt, synthetic construct
  source 1..19: mol_type = other RNA
gctccgggcactcagacat

SEQ ID NO: 222 - RNA, 19 nt, synthetic construct
  source 1..19: mol_type = other RNA
ctccgggcactcagacatc

SEQ ID NO: 223 - RNA, 19 nt, synthetic construct
  source 1..19: mol_type = other RNA
tccgggcactcagacatca

SEQ ID NO: 224 - RNA, 19 nt, synthetic construct
  source 1..19: mol_type = other RNA
ccgggcactcagacatcat

SEQ ID NO: 225 - RNA, 19 nt, synthetic construct
  source 1..19: mol_type = other RNA
cgggcactcagacatcatg

SEQ ID NO: 226 - RNA, 19 nt, synthetic construct
  source 1..19: mol_type = other RNA
gggcactcagacatcatga

SEQ ID NO: 227 - RNA, 19 nt, synthetic construct
  source 1..19: mol_type = other RNA
ggcactcagacatcatgag

SEQ ID NO: 228 - RNA, 19 nt, synthetic construct
  source 1..19: mol_type = other RNA
gcactcagacatcatgagt

SEQ ID NO: 229 - RNA, 19 nt, synthetic construct
  source 1..19: mol_type = other RNA
cactcagacatcatgagtt

SEQ ID NO: 230 - RNA, 19 nt, synthetic construct
  source 1..19: mol_type = other RNA
actcagacatcatgagttg

SEQ ID NO: 231 - RNA, 19 nt, synthetic construct
  source 1..19: mol_type = other RNA
ctcagacatcatgagttgg

SEQ ID NO: 232 - RNA, 19 nt, synthetic construct
  source 1..19: mol_type = other RNA
tcagacatcatgagttggt

SEQ ID NO: 233 - RNA, 19 nt, synthetic construct
  source 1..19: mol_type = other RNA
cagacatcatgagttggtc

SEQ ID NO: 234 - RNA, 19 nt, synthetic construct
  source 1..19: mol_type = other RNA
agacatcatgagttggtcc

SEQ ID NO: 235 - RNA, 19 nt, synthetic construct
  source 1..19: mol_type = other RNA
gacatcatgagttggtcct

SEQ ID NO: 236 - RNA, 19 nt, synthetic construct
  source 1..19: mol_type = other RNA
acatcatgagttggtcctt

SEQ ID NO: 237 - RNA, 19 nt, synthetic construct
  source 1..19: mol_type = other RNA
catcatgagttggtccttg

SEQ ID NO: 238 - RNA, 19 nt, synthetic construct
  source 1..19: mol_type = other RNA
atcatgagttggtccttgc

SEQ ID NO: 239 - RNA, 19 nt, synthetic construct
  source 1..19: mol_type = other RNA
tcatgagttggtccttgca

SEQ ID NO: 240 - RNA, 19 nt, synthetic construct
  source 1..19: mol_type = other RNA
catgagttggtccttgcac

SEQ ID NO: 241 - RNA, 19 nt, synthetic construct
  source 1..19: mol_type = other RNA
atgagttggtccttgcacc

SEQ ID NO: 242 - RNA, 19 nt, synthetic construct
  source 1..19: mol_type = other RNA
tgagttggtccttgcaccc

SEQ ID NO: 243 - RNA, 19 nt, synthetic construct
  source 1..19: mol_type = other RNA
gagttggtccttgcacccc

SEQ ID NO: 244 - RNA, 19 nt, synthetic construct
  source 1..19: mol_type = other RNA
agttggtccttgcaccccc

SEQ ID NO: 245 - RNA, 19 nt, synthetic construct
  source 1..19: mol_type = other RNA
gttggtccttgcacccccg

SEQ ID NO: 246 - RNA, 19 nt, synthetic construct
  source 1..19: mol_type = other RNA
ttggtccttgcacccccgg

SEQ ID NO: 247 - RNA, 19 nt, synthetic construct
  source 1..19: mol_type = other RNA
tggtccttgcacccccgga

SEQ ID NO: 248 - RNA, 19 nt, synthetic construct
  source 1..19: mol_type = other RNA
ggtccttgcacccccggaa

SEQ ID NO: 249 - RNA, 19 nt, synthetic construct
  source 1..19: mol_type = other RNA
gtccttgcacccccggaat

SEQ ID NO: 250 - RNA, 19 nt, synthetic construct
  source 1..19: mol_type = other RNA
tccttgcacccccggaatt

SEQ ID NO: 251 - RNA, 19 nt, synthetic construct
  source 1..19: mol_type = other RNA
ccttgcacccccggaattt

SEQ ID NO: 252 - RNA, 19 nt, synthetic construct
  source 1..19: mol_type = other RNA
cttgcacccccggaattta

SEQ ID NO: 253 - RNA, 19 nt, synthetic construct
  source 1..19: mol_type = other RNA
ttgcacccccggaatttaa

SEQ ID NO: 254 - RNA, 19 nt, synthetic construct
  source 1..19: mol_type = other RNA
tgcacccccggaatttaat

SEQ ID NO: 255 - RNA, 19 nt, synthetic construct
  source 1..19: mol_type = other RNA
gcacccccggaatttaatt

SEQ ID NO: 256 - RNA, 19 nt, synthetic construct
  source 1..19: mol_type = other RNA
cacccccggaatttaattc

SEQ ID NO: 257 - RNA, 19 nt, synthetic construct
  source 1..19: mol_type = other RNA
acccccggaatttaattct

SEQ ID NO: 258 - RNA, 19 nt, synthetic construct
  source 1..19: mol_type = other RNA
cccccggaatttaattctc

SEQ ID NO: 259 - RNA, 19 nt, synthetic construct
  source 1..19: mol_type = other RNA
ccccggaatttaattctct

SEQ ID NO: 260 - RNA, 19 nt, synthetic construct
  source 1..19: mol_type = other RNA
cccggaatttaattctcta

SEQ ID NO: 261 - RNA, 19 nt, synthetic construct
  source 1..19: mol_type = other RNA
ccggaatttaattctctac

SEQ ID NO: 262 - RNA, 19 nt, synthetic construct
  source 1..19: mol_type = other RNA
cggaatttaattctctact

SEQ ID NO: 263 - RNA, 19 nt, synthetic construct
  source 1..19: mol_type = other RNA
ggaatttaattctctactt

SEQ ID NO: 264 - RNA, 19 nt, synthetic construct
  source 1..19: mol_type = other RNA
gaatttaattctctacttc

SEQ ID NO: 265 - RNA, 19 nt, synthetic construct
  source 1..19: mol_type = other RNA
aatttaattctctacttct

SEQ ID NO: 266 - RNA, 19 nt, synthetic construct
  source 1..19: mol_type = other RNA
atttaattctctacttcta

SEQ ID NO: 267 - RNA, 19 nt, synthetic construct
  source 1..19: mol_type = other RNA
tttaattctctacttctat

SEQ ID NO: 268 - RNA, 19 nt, synthetic construct
  source 1..19: mol_type = other RNA
ttaattctctacttctatg

SEQ ID NO: 269 - RNA, 19 nt, synthetic construct
  source 1..19: mol_type = other RNA
taattctctacttctatgc

SEQ ID NO: 270 - RNA, 19 nt, synthetic construct
  source 1..19: mol_type = other RNA
aattctctacttctatgct

SEQ ID NO: 271 - RNA, 19 nt, synthetic construct
  source 1..19: mol_type = other RNA
attctctacttctatgctc

SEQ ID NO: 272 - RNA, 19 nt, synthetic construct
  source 1..19: mol_type = other RNA
ttctctacttctatgctct

SEQ ID NO: 273 - RNA, 19 nt, synthetic construct
  source 1..19: mol_type = other RNA
tctctacttctatgctctt

SEQ ID NO: 274 - RNA, 19 nt, synthetic construct
  source 1..19: mol_type = other RNA
ctctacttctatgctcttt

SEQ ID NO: 275 - RNA, 19 nt, synthetic construct
  source 1..19: mol_type = other RNA
tctacttctatgctctttt

SEQ ID NO: 276 - RNA, 19 nt, synthetic construct
  source 1..19: mol_type = other RNA
ctacttctatgctctttta

SEQ ID NO: 277 - RNA, 19 nt, synthetic construct
  source 1..19: mol_type = other RNA
tacttctatgctcttttat

SEQ ID NO: 278 - RNA, 19 nt, synthetic construct
  source 1..19: mol_type = other RNA
acttctatgctcttttatt

SEQ ID NO: 279 - RNA, 19 nt, synthetic construct
  source 1..19: mol_type = other RNA
cttctatgctcttttattt

SEQ ID NO: 280 - RNA, 19 nt, synthetic construct
  source 1..19: mol_type = other RNA
ttctatgctcttttatttc

SEQ ID NO: 281 - RNA, 19 nt, synthetic construct
  source 1..19: mol_type = other RNA
tctatgctcttttatttct

SEQ ID NO: 282 - RNA, 19 nt, synthetic construct
  source 1..19: mol_type = other RNA
ctatgctcttttatttctc

SEQ ID NO: 283 - RNA, 19 nt, synthetic construct
  source 1..19: mol_type = other RNA
tatgctcttttatttctct

SEQ ID NO: 284 - RNA, 19 nt, synthetic construct
  source 1..19: mol_type = other RNA
atgctcttttatttctctc

SEQ ID NO: 285 - RNA, 19 nt, synthetic construct
  source 1..19: mol_type = other RNA
tgctcttttatttctctct

SEQ ID NO: 286 - RNA, 19 nt, synthetic construct
  source 1..19: mol_type = other RNA
gctcttttatttctctctt

SEQ ID NO: 287 - RNA, 19 nt, synthetic construct
  source 1..19: mol_type = other RNA
ctcttttatttctctcttc

SEQ ID NO: 288 - RNA, 19 nt, synthetic construct
  source 1..19: mol_type = other RNA
tcttttatttctctcttca

SEQ ID NO: 289 - RNA, 19 nt, synthetic construct
  source 1..19: mol_type = other RNA
cttttatttctctcttcaa

SEQ ID NO: 290 - RNA, 19 nt, synthetic construct
  source 1..19: mol_type = other RNA
ttttatttctctcttcaac

SEQ ID NO: 291 - RNA, 19 nt, synthetic construct
  source 1..19: mol_type = other RNA
tttatttctctcttcaaca

SEQ ID NO: 292 - RNA, 19 nt, synthetic construct
  source 1..19: mol_type = other RNA
ttatttctctcttcaacat

SEQ ID NO: 293 - RNA, 19 nt, synthetic construct
  source 1..19: mol_type = other RNA
tatttctctcttcaacatg

SEQ ID NO: 294 - RNA, 19 nt, synthetic construct
  source 1..19: mol_type = other RNA
atttctctcttcaacatgt

SEQ ID NO: 295 - RNA, 19 nt, synthetic construct
  source 1..19: mol_type = other RNA
tttctctcttcaacatgtg

SEQ ID NO: 296 - RNA, 19 nt, synthetic construct
  source 1..19: mol_type = other RNA
ttctctcttcaacatgtgt

SEQ ID NO: 297 - RNA, 19 nt, synthetic construct
  source 1..19: mol_type = other RNA
tctctcttcaacatgtgta

SEQ ID NO: 298 - RNA, 19 nt, synthetic construct
  source 1..19: mol_type = other RNA
ctctcttcaacatgtgtag

SEQ ID NO: 299 - RNA, 19 nt, synthetic construct
  source 1..19: mol_type = other RNA
tctcttcaacatgtgtagc

SEQ ID NO: 300 - RNA, 19 nt, synthetic construct
  source 1..19: mol_type = other RNA
ctcttcaacatgtgtagca

SEQ ID NO: 301 - RNA, 19 nt, synthetic construct
  source 1..19: mol_type = other RNA
tcttcaacatgtgtagcat

SEQ ID NO: 302 - RNA, 19 nt, synthetic construct
  source 1..19: mol_type = other RNA
cttcaacatgtgtagcata

SEQ ID NO: 303 - RNA, 19 nt, synthetic construct
  source 1..19: mol_type = other RNA
ttcaacatgtgtagcatat

SEQ ID NO: 304 - RNA, 19 nt, synthetic construct
  source 1..19: mol_type = other RNA
tcaacatgtgtagcatatg

SEQ ID NO: 305 - RNA, 19 nt, synthetic construct
  source 1..19: mol_type = other RNA
caacatgtgtagcatatgt

SEQ ID NO: 306 - RNA, 19 nt, synthetic construct
  source 1..19: mol_type = other RNA
aacatgtgtagcatatgtt

SEQ ID NO: 307 - RNA, 19 nt, synthetic construct
  source 1..19: mol_type = other RNA
acatgtgtagcatatgttg

SEQ ID NO: 308 - RNA, 19 nt, synthetic construct
  source 1..19: mol_type = other RNA
catgtgtagcatatgttgc

SEQ ID NO: 309 - RNA, 19 nt, synthetic construct
  source 1..19: mol_type = other RNA
atgtgtagcatatgttgct

SEQ ID NO: 310 - RNA, 19 nt, synthetic construct
  source 1..19: mol_type = other RNA
tgtgtagcatatgttgcta

SEQ ID NO: 311 - RNA, 19 nt, synthetic construct
  source 1..19: mol_type = other RNA
gtgtagcatatgttgctac

SEQ ID NO: 312 - RNA, 19 nt, synthetic construct
  source 1..19: mol_type = other RNA
tgtagcatatgttgctacc

SEQ ID NO: 313 - RNA, 19 nt, synthetic construct
  source 1..19: mol_type = other RNA
gtagcatatgttgctacca

SEQ ID NO: 314 - RNA, 19 nt, synthetic construct
  source 1..19: mol_type = other RNA
tagcatatgttgctaccag

SEQ ID NO: 315 - RNA, 19 nt, synthetic construct
  source 1..19: mol_type = other RNA
agcatatgttgctaccaga

SEQ ID NO: 316 - RNA, 19 nt, synthetic construct
  source 1..19: mol_type = other RNA
gcatatgttgctaccagag

SEQ ID NO: 317 - RNA, 19 nt, synthetic construct
  source 1..19: mol_type = other RNA
catatgttgctaccagaga

SEQ ID NO: 318 - RNA, 19 nt, synthetic construct
  source 1..19: mol_type = other RNA
atatgttgctaccagagac

SEQ ID NO: 319 - RNA, 19 nt, synthetic construct
  source 1..19: mol_type = other RNA
tatgttgctaccagagaca

SEQ ID NO: 320 - RNA, 19 nt, synthetic construct
  source 1..19: mol_type = other RNA
atgttgctaccagagacaa

SEQ ID NO: 321 - RNA, 19 nt, synthetic construct
  source 1..19: mol_type = other RNA
tgttgctaccagagacaac

SEQ ID NO: 322 - RNA, 19 nt, synthetic construct
  source 1..19: mol_type = other RNA
gttgctaccagagacaact

SEQ ID NO: 323 - RNA, 19 nt, synthetic construct
  source 1..19: mol_type = other RNA
ttgctaccagagacaactg

SEQ ID NO: 324 - RNA, 19 nt, synthetic construct
  source 1..19: mol_type = other RNA
tgctaccagagacaactgc

SEQ ID NO: 325 - RNA, 19 nt, synthetic construct
  source 1..19: mol_type = other RNA
gctaccagagacaactgct

SEQ ID NO: 326 - RNA, 19 nt, synthetic construct
  source 1..19: mol_type = other RNA
ctaccagagacaactgctg

SEQ ID NO: 327 - RNA, 19 nt, synthetic construct
  source 1..19: mol_type = other RNA
taccagagacaactgctgc

SEQ ID NO: 328 - RNA, 19 nt, synthetic construct
  source 1..19: mol_type = other RNA
accagagacaactgctgca

SEQ ID NO: 329 - RNA, 19 nt, synthetic construct
  source 1..19: mol_type = other RNA
ccagagacaactgctgcat

SEQ ID NO: 330 - RNA, 19 nt, synthetic construct
  source 1..19: mol_type = other RNA
cagagacaactgctgcatc

SEQ ID NO: 331 - RNA, 19 nt, synthetic construct
  source 1..19: mol_type = other RNA
agagacaactgctgcatct

SEQ ID NO: 332 - RNA, 19 nt, synthetic construct
  source 1..19: mol_type = other RNA
gagacaactgctgcatctt

SEQ ID NO: 333 - RNA, 19 nt, synthetic construct
  source 1..19: mol_type = other RNA
agacaactgctgcatctta

SEQ ID NO: 334 - RNA, 19 nt, synthetic construct
  source 1..19: mol_type = other RNA
gacaactgctgcatcttag

SEQ ID NO: 335 - RNA, 19 nt, synthetic construct
  source 1..19: mol_type = other RNA
acaactgctgcatcttaga

SEQ ID NO: 336 - RNA, 19 nt, synthetic construct
  source 1..19: mol_type = other RNA
caactgctgcatcttagat

SEQ ID NO: 337 - RNA, 19 nt, synthetic construct
  source 1..19: mol_type = other RNA
aactgctgcatcttagatg

SEQ ID NO: 338 - RNA, 19 nt, synthetic construct
  source 1..19: mol_type = other RNA
actgctgcatcttagatga

SEQ ID NO: 339 - RNA, 19 nt, synthetic construct
  source 1..19: mol_type = other RNA
ctgctgcatcttagatgaa

SEQ ID NO: 340 - RNA, 19 nt, synthetic construct
  source 1..19: mol_type = other RNA
tgctgcatcttagatgaaa

SEQ ID NO: 341 - RNA, 19 nt, synthetic construct
  source 1..19: mol_type = other RNA
gctgcatcttagatgaaag

SEQ ID NO: 342 - RNA, 19 nt, synthetic construct
  source 1..19: mol_type = other RNA
ctgcatcttagatgaaaga

SEQ ID NO: 343 - RNA, 19 nt, synthetic construct
  source 1..19: mol_type = other RNA
tgcatcttagatgaaagat

SEQ ID NO: 344 - RNA, 19 nt, synthetic construct
  source 1..19: mol_type = other RNA
gcatcttagatgaaagatt

SEQ ID NO: 345 - RNA, 19 nt, synthetic construct
  source 1..19: mol_type = other RNA
catcttagatgaaagattc

SEQ ID NO: 346 - RNA, 19 nt, synthetic construct
  source 1..19: mol_type = other RNA
atcttagatgaaagattcg

SEQ ID NO: 347 - RNA, 19 nt, synthetic construct
  source 1..19: mol_type = other RNA
tcttagatgaaagattcgg

SEQ ID NO: 348 - RNA, 19 nt, synthetic construct
  source 1..19: mol_type = other RNA
cttagatgaaagattcggt

SEQ ID NO: 349 - RNA, 19 nt, synthetic construct
  source 1..19: mol_type = other RNA
ttagatgaaagattcggta

SEQ ID NO: 350 - RNA, 19 nt, synthetic construct
  source 1..19: mol_type = other RNA
tagatgaaagattcggtag

SEQ ID NO: 351 - RNA, 19 nt, synthetic construct
  source 1..19: mol_type = other RNA
agatgaaagattcggtagt

SEQ ID NO: 352 - RNA, 19 nt, synthetic construct
  source 1..19: mol_type = other RNA
gatgaaagattcggtagtt

SEQ ID NO: 353 - RNA, 19 nt, synthetic construct
  source 1..19: mol_type = other RNA
atgaaagattcggtagtta

SEQ ID NO: 354 - RNA, 19 nt, synthetic construct
  source 1..19: mol_type = other RNA
tgaaagattcggtagttat

SEQ ID NO: 355 - RNA, 19 nt, synthetic construct
  source 1..19: mol_type = other RNA
gaaagattcggtagttatt

SEQ ID NO: 356 - RNA, 19 nt, synthetic construct
  source 1..19: mol_type = other RNA
aaagattcggtagttattg

SEQ ID NO: 357 - RNA, 19 nt, synthetic construct
  source 1..19: mol_type = other RNA
aagattcggtagttattgt

SEQ ID NO: 358 - RNA, 19 nt, synthetic construct
  source 1..19: mol_type = other RNA
agattcggtagttattgtc

SEQ ID NO: 359 - RNA, 19 nt, synthetic construct
  source 1..19: mol_type = other RNA
gattcggtagttattgtcc

SEQ ID NO: 360 - RNA, 19 nt, synthetic construct
  source 1..19: mol_type = other RNA
attcggtagttattgtcca

SEQ ID NO: 361 - RNA, 19 nt, synthetic construct
  source 1..19: mol_type = other RNA
ttcggtagttattgtccaa

SEQ ID NO: 362 - RNA, 19 nt, synthetic construct
  source 1..19: mol_type = other RNA
tcggtagttattgtccaac

SEQ ID NO: 363 - RNA, 19 nt, synthetic construct
  source 1..19: mol_type = other RNA
cggtagttattgtccaact

SEQ ID NO: 364 - RNA, 19 nt, synthetic construct
  source 1..19: mol_type = other RNA
ggtagttattgtccaacta

SEQ ID NO: 365 - RNA, 19 nt, synthetic construct
  source 1..19: mol_type = other RNA
gtagttattgtccaactac

SEQ ID NO: 366 - RNA, 19 nt, synthetic construct
  source 1..19: mol_type = other RNA
tagttattgtccaactacc

SEQ ID NO: 367 - RNA, 19 nt, synthetic construct
  source 1..19: mol_type = other RNA
agttattgtccaactacct

SEQ ID NO: 368 - RNA, 19 nt, synthetic construct
  source 1..19: mol_type = other RNA
gttattgtccaactacctg

SEQ ID NO: 369 - RNA, 19 nt, synthetic construct
  source 1..19: mol_type = other RNA
ttattgtccaactacctgt

SEQ ID NO: 370 - RNA, 19 nt, synthetic construct
  source 1..19: mol_type = other RNA
tattgtccaactacctgtg

SEQ ID NO: 371 - RNA, 19 nt, synthetic construct
  source 1..19: mol_type = other RNA
attgtccaactacctgtgg

SEQ ID NO: 372 - RNA, 19 nt, synthetic construct
  source 1..19: mol_type = other RNA
ttgtccaactacctgtggc

SEQ ID NO: 373 - RNA, 19 nt, synthetic construct
  source 1..19: mol_type = other RNA
tgtccaactacctgtggca

SEQ ID NO: 374 - RNA, 19 nt, synthetic construct
  source 1..19: mol_type = other RNA
gtccaactacctgtggcat

SEQ ID NO: 375 - RNA, 19 nt, synthetic construct
  source 1..19: mol_type = other RNA
tccaactacctgtggcatt

SEQ ID NO: 376 - RNA, 19 nt, synthetic construct
  source 1..19: mol_type = other RNA
ccaactacctgtggcattg

SEQ ID NO: 377 - RNA, 19 nt, synthetic construct
  source 1..19: mol_type = other RNA
caactacctgtggcattgc

SEQ ID NO: 378 - RNA, 19 nt, synthetic construct
  source 1..19: mol_type = other RNA
aactacctgtggcattgca

SEQ ID NO: 379 - RNA, 19 nt, synthetic construct
  source 1..19: mol_type = other RNA
actacctgtggcattgcag

SEQ ID NO: 380 - RNA, 19 nt, synthetic construct
  source 1..19: mol_type = other RNA
ctacctgtggcattgcaga

SEQ ID NO: 381 - RNA, 19 nt, synthetic construct
  source 1..19: mol_type = other RNA
tacctgtggcattgcagat

SEQ ID NO: 382 - RNA, 19 nt, synthetic construct
  source 1..19: mol_type = other RNA
acctgtggcattgcagatt

SEQ ID NO: 383 - RNA, 19 nt, synthetic construct
  source 1..19: mol_type = other RNA
cctgtggcattgcagattt

SEQ ID NO: 384 - RNA, 19 nt, synthetic construct
  source 1..19: mol_type = other RNA
ctgtggcattgcagatttc

SEQ ID NO: 385 - RNA, 19 nt, synthetic construct
  source 1..19: mol_type = other RNA
tgtggcattgcagatttcc

SEQ ID NO: 386 - RNA, 19 nt, synthetic construct
  source 1..19: mol_type = other RNA
gtggcattgcagatttcct

SEQ ID NO: 387 - RNA, 19 nt, synthetic construct
  source 1..19: mol_type = other RNA
tggcattgcagatttcctg

SEQ ID NO: 388 - RNA, 19 nt, synthetic construct
  source 1..19: mol_type = other RNA
ggcattgcagatttcctgt

SEQ ID NO: 389 - RNA, 19 nt, synthetic construct
  source 1..19: mol_type = other RNA
gcattgcagatttcctgtc

SEQ ID NO: 390 - RNA, 19 nt, synthetic construct
  source 1..19: mol_type = other RNA
cattgcagatttcctgtct

SEQ ID NO: 391 - RNA, 19 nt, synthetic construct
  source 1..19: mol_type = other RNA
attgcagatttcctgtcta

SEQ ID NO: 392 - RNA, 19 nt, synthetic construct
  source 1..19: mol_type = other RNA
ttgcagatttcctgtctac

SEQ ID NO: 393 - RNA, 19 nt, synthetic construct
  source 1..19: mol_type = other RNA
tgcagatttcctgtctact

SEQ ID NO: 394 - RNA, 19 nt, synthetic construct
  source 1..19: mol_type = other RNA
gcagatttcctgtctactt

SEQ ID NO: 395 - RNA, 19 nt, synthetic construct
  source 1..19: mol_type = other RNA
cagatttcctgtctactta

SEQ ID NO: 396 - RNA, 19 nt, synthetic construct
  source 1..19: mol_type = other RNA
agatttcctgtctacttat

SEQ ID NO: 397 - RNA, 19 nt, synthetic construct
  source 1..19: mol_type = other RNA
gatttcctgtctacttatc

SEQ ID NO: 398 - RNA, 19 nt, synthetic construct
  source 1..19: mol_type = other RNA
atttcctgtctacttatca

SEQ ID NO: 399 - RNA, 19 nt, synthetic construct
  source 1..19: mol_type = other RNA
tttcctgtctacttatcaa

SEQ ID NO: 400 - RNA, 19 nt, synthetic construct
  source 1..19: mol_type = other RNA
ttcctgtctacttatcaaa

SEQ ID NO: 401 - RNA, 19 nt, synthetic construct
  source 1..19: mol_type = other RNA
tcctgtctacttatcaaac

SEQ ID NO: 402 - RNA, 19 nt, synthetic construct
  source 1..19: mol_type = other RNA
cctgtctacttatcaaacc

SEQ ID NO: 403 - RNA, 19 nt, synthetic construct
  source 1..19: mol_type = other RNA
ctgtctacttatcaaacca

SEQ ID NO: 404 - RNA, 19 nt, synthetic construct
  source 1..19: mol_type = other RNA
tgtctacttatcaaaccaa

SEQ ID NO: 405 - RNA, 19 nt, synthetic construct
  source 1..19: mol_type = other RNA
gtctacttatcaaaccaaa

SEQ ID NO: 406 - RNA, 19 nt, synthetic construct
  source 1..19: mol_type = other RNA
tctacttatcaaaccaaag

SEQ ID NO: 407 - RNA, 19 nt, synthetic construct
  source 1..19: mol_type = other RNA
ctacttatcaaaccaaagt

SEQ ID NO: 408 - RNA, 19 nt, synthetic construct
  source 1..19: mol_type = other RNA
tacttatcaaaccaaagta

SEQ ID NO: 409 - RNA, 19 nt, synthetic construct
  source 1..19: mol_type = other RNA
acttatcaaaccaaagtag

SEQ ID NO: 410 - RNA, 19 nt, synthetic construct
  source 1..19: mol_type = other RNA
cttatcaaaccaaagtaga

SEQ ID NO: 411 - RNA, 19 nt, synthetic construct
  source 1..19: mol_type = other RNA
ttatcaaaccaaagtagac

SEQ ID NO: 412 - RNA, 19 nt, synthetic construct
  source 1..19: mol_type = other RNA
tatcaaaccaaagtagaca

SEQ ID NO: 413 - RNA, 19 nt, synthetic construct
  source 1..19: mol_type = other RNA
atcaaaccaaagtagacaa

SEQ ID NO: 414 - RNA, 19 nt, synthetic construct
  source 1..19: mol_type = other RNA
tcaaaccaaagtagacaag

SEQ ID NO: 415 - RNA, 19 nt, synthetic construct
  source 1..19: mol_type = other RNA
caaaccaaagtagacaagg

SEQ ID NO: 416 - RNA, 19 nt, synthetic construct
  source 1..19: mol_type = other RNA
aaaccaaagtagacaagga

SEQ ID NO: 417 - RNA, 19 nt, synthetic construct
  source 1..19: mol_type = other RNA
aaccaaagtagacaaggat

SEQ ID NO: 418 - RNA, 19 nt, synthetic construct
  source 1..19: mol_type = other RNA
accaaagtagacaaggatc

SEQ ID NO: 419 - RNA, 19 nt, synthetic construct
  source 1..19: mol_type = other RNA
ccaaagtagacaaggatct

SEQ ID NO: 420 - RNA, 19 nt, synthetic construct
  source 1..19: mol_type = other RNA
caaagtagacaaggatcta

SEQ ID NO: 421 - RNA, 19 nt, synthetic construct
  source 1..19: mol_type = other RNA
aaagtagacaaggatctac

SEQ ID NO: 422 - RNA, 19 nt, synthetic construct
  source 1..19: mol_type = other RNA
aagtagacaaggatctaca

SEQ ID NO: 423 - RNA, 19 nt, synthetic construct
  source 1..19: mol_type = other RNA
agtagacaaggatctacag

SEQ ID NO: 424 - RNA, 19 nt, synthetic construct
  source 1..19: mol_type = other RNA
gtagacaaggatctacagt

SEQ ID NO: 425 - RNA, 19 nt, synthetic construct
  source 1..19: mol_type = other RNA
tagacaaggatctacagtc

SEQ ID NO: 426 - RNA, 19 nt, synthetic construct
  source 1..19: mol_type = other RNA
agacaaggatctacagtct

SEQ ID NO: 427 - RNA, 19 nt, synthetic construct
  source 1..19: mol_type = other RNA
gacaaggatctacagtctt

SEQ ID NO: 428 - RNA, 19 nt, synthetic construct
  source 1..19: mol_type = other RNA
acaaggatctacagtcttt

SEQ ID NO: 429 - RNA, 19 nt, synthetic construct
  source 1..19: mol_type = other RNA
caaggatctacagtctttg

SEQ ID NO: 430 - RNA, 19 nt, synthetic construct
  source 1..19: mol_type = other RNA
aaggatctacagtctttgg

SEQ ID NO: 431 - RNA, 19 nt, synthetic construct
  source 1..19: mol_type = other RNA
aggatctacagtctttgga

SEQ ID NO: 432 - RNA, 19 nt, synthetic construct
  source 1..19: mol_type = other RNA
ggatctacagtctttggaa

SEQ ID NO: 433 - RNA, 19 nt, synthetic construct
  source 1..19: mol_type = other RNA
gatctacagtctttggaag

SEQ ID NO: 434 - RNA, 19 nt, synthetic construct
  source 1..19: mol_type = other RNA
atctacagtctttggaaga

SEQ ID NO: 435 - RNA, 19 nt, synthetic construct
  source 1..19: mol_type = other RNA
tctacagtctttggaagac

SEQ ID NO: 436 - RNA, 19 nt, synthetic construct
  source 1..19: mol_type = other RNA
ctacagtctttggaagaca

SEQ ID NO: 437 - RNA, 19 nt, synthetic construct
  source 1..19: mol_type = other RNA
tacagtctttggaagacat

SEQ ID NO: 438 - RNA, 19 nt, synthetic construct
  source 1..19: mol_type = other RNA
acagtctttggaagacatc

SEQ ID NO: 439 - RNA, 19 nt, synthetic construct
  source 1..19: mol_type = other RNA
cagtctttggaagacatct

SEQ ID NO: 440 - RNA, 19 nt, synthetic construct
  source 1..19: mol_type = other RNA
agtctttggaagacatctt

SEQ ID NO: 441 - RNA, 19 nt, synthetic construct
  source 1..19: mol_type = other RNA
gtctttggaagacatctta

SEQ ID NO: 442 - RNA, 19 nt, synthetic construct
  source 1..19: mol_type = other RNA
tctttggaagacatcttac

SEQ ID NO: 443 - RNA, 19 nt, synthetic construct
  source 1..19: mol_type = other RNA
ctttggaagacatcttaca

SEQ ID NO: 444 - RNA, 19 nt, synthetic construct
  source 1..19: mol_type = other RNA
tttggaagacatcttacat

SEQ ID NO: 445 - RNA, 19 nt, synthetic construct
  source 1..19: mol_type = other RNA
ttggaagacatcttacatc

SEQ ID NO: 446 - RNA, 19 nt, synthetic construct
  source 1..19: mol_type = other RNA
tggaagacatcttacatca

SEQ ID NO: 447 - RNA, 19 nt, synthetic construct
  source 1..19: mol_type = other RNA
ggaagacatcttacatcaa

SEQ ID NO: 448 - RNA, 19 nt, synthetic construct
  source 1..19: mol_type = other RNA
gaagacatcttacatcaag

SEQ ID NO: 449 - RNA, 19 nt, synthetic construct
  source 1..19: mol_type = other RNA
aagacatcttacatcaagt

SEQ ID NO: 450 - RNA, 19 nt, synthetic construct
  source 1..19: mol_type = other RNA
agacatcttacatcaagtt

SEQ ID NO: 451 - RNA, 19 nt, synthetic construct
  source 1..19: mol_type = other RNA
gacatcttacatcaagttg

SEQ ID NO: 452 - RNA, 19 nt, synthetic construct
  source 1..19: mol_type = other RNA
acatcttacatcaagttga

SEQ ID NO: 453 - RNA, 19 nt, synthetic construct
  source 1..19: mol_type = other RNA
catcttacatcaagttgaa

SEQ ID NO: 454 - RNA, 19 nt, synthetic construct
  source 1..19: mol_type = other RNA
atcttacatcaagttgaaa

SEQ ID NO: 455 - RNA, 19 nt, synthetic construct
  source 1..19: mol_type = other RNA
tcttacatcaagttgaaaa

SEQ ID NO: 456 - RNA, 19 nt, synthetic construct
  source 1..19: mol_type = other RNA
cttacatcaagttgaaaac

SEQ ID NO: 457 - RNA, 19 nt, synthetic construct
  source 1..19: mol_type = other RNA
ttacatcaagttgaaaaca

SEQ ID NO: 458 - RNA, 19 nt, synthetic construct
  source 1..19: mol_type = other RNA
tacatcaagttgaaaacaa

SEQ ID NO: 459 - RNA, 19 nt, synthetic construct
  source 1..19: mol_type = other RNA
acatcaagttgaaaacaaa

SEQ ID NO: 460 - RNA, 19 nt, synthetic construct
  source 1..19: mol_type = other RNA
catcaagttgaaaacaaaa

SEQ ID NO: 461 - RNA, 19 nt, synthetic construct
  source 1..19: mol_type = other RNA
atcaagttgaaaacaaaac

SEQ ID NO: 462 - RNA, 19 nt, synthetic construct
  source 1..19: mol_type = other RNA
tcaagttgaaaacaaaaca

SEQ ID NO: 463 - RNA, 19 nt, synthetic construct
  source 1..19: mol_type = other RNA
caagttgaaaacaaaacat

SEQ ID NO: 464 - RNA, 19 nt, synthetic construct
  source 1..19: mol_type = other RNA
aagttgaaaacaaaacatc

SEQ ID NO: 465 - RNA, 19 nt, synthetic construct
  source 1..19: mol_type = other RNA
agttgaaaacaaaacatca

SEQ ID NO: 466 - RNA, 19 nt, synthetic construct
  source 1..19: mol_type = other RNA
gttgaaaacaaaacatcag

SEQ ID NO: 467 - RNA, 19 nt, synthetic construct
  source 1..19: mol_type = other RNA
ttgaaaacaaaacatcaga

SEQ ID NO: 468 - RNA, 19 nt, synthetic construct
  source 1..19: mol_type = other RNA
tgaaaacaaaacatcagaa

SEQ ID NO: 469 - RNA, 19 nt, synthetic construct
  source 1..19: mol_type = other RNA
gaaaacaaaacatcagaag

SEQ ID NO: 470 - RNA, 19 nt, synthetic construct
  source 1..19: mol_type = other RNA
aaaacaaaacatcagaagt

SEQ ID NO: 471 - RNA, 19 nt, synthetic construct
  source 1..19: mol_type = other RNA
aaacaaaacatcagaagtc

SEQ ID NO: 472 - RNA, 19 nt, synthetic construct
  source 1..19: mol_type = other RNA
aacaaaacatcagaagtca

SEQ ID NO: 473 - RNA, 19 nt, synthetic construct
  source 1..19: mol_type = other RNA
acaaaacatcagaagtcaa

SEQ ID NO: 474 - RNA, 19 nt, synthetic construct
  source 1..19: mol_type = other RNA
caaaacatcagaagtcaaa

SEQ ID NO: 475 - RNA, 19 nt, synthetic construct
  source 1..19: mol_type = other RNA
aaaacatcagaagtcaaac

SEQ ID NO: 476 - RNA, 19 nt, synthetic construct
  source 1..19: mol_type = other RNA
aaacatcagaagtcaaaca

SEQ ID NO: 477 - RNA, 19 nt, synthetic construct
  source 1..19: mol_type = other RNA
aacatcagaagtcaaacag

SEQ ID NO: 478 - RNA, 19 nt, synthetic construct
  source 1..19: mol_type = other RNA
acatcagaagtcaaacagc

SEQ ID NO: 479 - RNA, 19 nt, synthetic construct
  source 1..19: mol_type = other RNA
catcagaagtcaaacagct

SEQ ID NO: 480 - RNA, 19 nt, synthetic construct
  source 1..19: mol_type = other RNA
atcagaagtcaaacagctg

SEQ ID NO: 481 - RNA, 19 nt, synthetic construct
  source 1..19: mol_type = other RNA
tcagaagtcaaacagctga

SEQ ID NO: 482 - RNA, 19 nt, synthetic construct
  source 1..19: mol_type = other RNA
cagaagtcaaacagctgat

SEQ ID NO: 483 - RNA, 19 nt, synthetic construct
  source 1..19: mol_type = other RNA
agaagtcaaacagctgata

SEQ ID NO: 484 - RNA, 19 nt, synthetic construct
  source 1..19: mol_type = other RNA
gaagtcaaacagctgataa

SEQ ID NO: 485 - RNA, 19 nt, synthetic construct
  source 1..19: mol_type = other RNA
aagtcaaacagctgataaa

SEQ ID NO: 486 - RNA, 19 nt, synthetic construct
  source 1..19: mol_type = other RNA
agtcaaacagctgataaaa

SEQ ID NO: 487 - RNA, 19 nt, synthetic construct
  source 1..19: mol_type = other RNA
gtcaaacagctgataaaag

SEQ ID NO: 488 - RNA, 19 nt, synthetic construct
  source 1..19: mol_type = other RNA
tcaaacagctgataaaagc

SEQ ID NO: 489 - RNA, 19 nt, synthetic construct
  source 1..19: mol_type = other RNA
caaacagctgataaaagca

SEQ ID NO: 490 - RNA, 19 nt, synthetic construct
  source 1..19: mol_type = other RNA
aaacagctgataaaagcaa

SEQ ID NO: 491 - RNA, 19 nt, synthetic construct
  source 1..19: mol_type = other RNA
aacagctgataaaagcaat

SEQ ID NO: 492 - RNA, 19 nt, synthetic construct
  source 1..19: mol_type = other RNA
acagctgataaaagcaatc

SEQ ID NO: 493 - RNA, 19 nt, synthetic construct
  source 1..19: mol_type = other RNA
cagctgataaaagcaatcc

SEQ ID NO: 494 - RNA, 19 nt, synthetic construct
  source 1..19: mol_type = other RNA
agctgataaaagcaatcca

SEQ ID NO: 495 - RNA, 19 nt, synthetic construct
  source 1..19: mol_type = other RNA
gctgataaaagcaatccaa

SEQ ID NO: 496 - RNA, 19 nt, synthetic construct
  source 1..19: mol_type = other RNA
ctgataaaagcaatccaac

SEQ ID NO: 497 - RNA, 19 nt, synthetic construct
  source 1..19: mol_type = other RNA
tgataaaagcaatccaact

SEQ ID NO: 498 - RNA, 19 nt, synthetic construct
  source 1..19: mol_type = other RNA
gataaaagcaatccaactc

SEQ ID NO: 499 - RNA, 19 nt, synthetic construct
  source 1..19: mol_type = other RNA
ataaaagcaatccaactca

SEQ ID NO: 500 - RNA, 19 nt, synthetic construct
  source 1..19: mol_type = other RNA
taaaagcaatccaactcac

SEQ ID NO: 501 - RNA, 19 nt, synthetic construct
  source 1..19: mol_type = other RNA
aaaagcaatccaactcact

SEQ ID NO: 502 - RNA, 19 nt, synthetic construct
  source 1..19: mol_type = other RNA
aaagcaatccaactcactt

SEQ ID NO: 503 - RNA, 19 nt, synthetic construct
  source 1..19: mol_type = other RNA
aagcaatccaactcactta

SEQ ID NO: 504 - RNA, 19 nt, synthetic construct
  source 1..19: mol_type = other RNA
agcaatccaactcacttat

SEQ ID NO: 505 - RNA, 19 nt, synthetic construct
  source 1..19: mol_type = other RNA
gcaatccaactcacttata

SEQ ID NO: 506 - RNA, 19 nt, synthetic construct
  source 1..19: mol_type = other RNA
caatccaactcacttataa

SEQ ID NO: 507 - RNA, 19 nt, synthetic construct
  source 1..19: mol_type = other RNA
aatccaactcacttataat

SEQ ID NO: 508 - RNA, 19 nt, synthetic construct
  source 1..19: mol_type = other RNA
atccaactcacttataatc

SEQ ID NO: 509 - RNA, 19 nt, synthetic construct
  source 1..19: mol_type = other RNA
tccaactcacttataatcc

SEQ ID NO: 510 - RNA, 19 nt, synthetic construct
  source 1..19: mol_type = other RNA
ccaactcacttataatcct

SEQ ID NO: 511 - RNA, 19 nt, synthetic construct
  source 1..19: mol_type = other RNA
caactcacttataatcctg

SEQ ID NO: 512 - RNA, 19 nt, synthetic construct
  source 1..19: mol_type = other RNA
aactcacttataatcctga

SEQ ID NO: 513 - RNA, 19 nt, synthetic construct
  source 1..19: mol_type = other RNA
actcacttataatcctgat

SEQ ID NO: 514 - RNA, 19 nt, synthetic construct
  source 1..19: mol_type = other RNA
ctcacttataatcctgatg

SEQ ID NO: 515 - RNA, 19 nt, synthetic construct
  source 1..19: mol_type = other RNA
tcacttataatcctgatga

SEQ ID NO: 516 - RNA, 19 nt, synthetic construct
  source 1..19: mol_type = other RNA
cacttataatcctgatgaa

SEQ ID NO: 517 - RNA, 19 nt, synthetic construct
  source 1..19: mol_type = other RNA
acttataatcctgatgaat

SEQ ID NO: 518 - protein, 19 aa, synthetic construct
CTTATAATCCTGATGAATC

SEQ ID NO: 519 - RNA, 19 nt, synthetic construct
  source 1..19: mol_type = other RNA
ttataatcctgatgaatca

SEQ ID NO: 520 - RNA, 19 nt, synthetic construct
  source 1..19: mol_type = other RNA
tataatcctgatgaatcat

SEQ ID NO: 521 - RNA, 19 nt, synthetic construct
  source 1..19: mol_type = other RNA
ataatcctgatgaatcatc

SEQ ID NO: 522 - RNA, 19 nt, synthetic construct
  source 1..19: mol_type = other RNA
taatcctgatgaatcatca

SEQ ID NO: 523 - RNA, 19 nt, synthetic construct
  source 1..19: mol_type = other RNA
aatcctgatgaatcatcaa

SEQ ID NO: 524 - RNA, 19 nt, synthetic construct
  source 1..19: mol_type = other RNA
atcctgatgaatcatcaaa

SEQ ID NO: 525 - RNA, 19 nt, synthetic construct
  source 1..19: mol_type = other RNA
tcctgatgaatcatcaaaa

SEQ ID NO: 526 - RNA, 19 nt, synthetic construct
  source 1..19: mol_type = other RNA
cctgatgaatcatcaaaac

SEQ ID NO: 527 - RNA, 19 nt, synthetic construct
  source 1..19: mol_type = other RNA
ctgatgaatcatcaaaacc

SEQ ID NO: 528 - RNA, 19 nt, synthetic construct
  source 1..19: mol_type = other RNA
tgatgaatcatcaaaacca

SEQ ID NO: 529 - RNA, 19 nt, synthetic construct
  source 1..19: mol_type = other RNA
gatgaatcatcaaaaccaa

SEQ ID NO: 530 - RNA, 19 nt, synthetic construct
  source 1..19: mol_type = other RNA
atgaatcatcaaaaccaaa

SEQ ID NO: 531 - RNA, 19 nt, synthetic construct
  source 1..19: mol_type = other RNA
tgaatcatcaaaaccaaat

SEQ ID NO: 532 - RNA, 19 nt, synthetic construct
  source 1..19: mol_type = other RNA
gaatcatcaaaaccaaata

SEQ ID NO: 533 - RNA, 19 nt, synthetic construct
  source 1..19: mol_type = other RNA
aatcatcaaaaccaaatat

SEQ ID NO: 534 - RNA, 19 nt, synthetic construct
  source 1..19: mol_type = other RNA
atcatcaaaaccaaatatg

SEQ ID NO: 535 - RNA, 19 nt, synthetic construct
  source 1..19: mol_type = other RNA
tcatcaaaaccaaatatga

SEQ ID NO: 536 - RNA, 19 nt, synthetic construct
  source 1..19: mol_type = other RNA
catcaaaaccaaatatgat

SEQ ID NO: 537 - RNA, 19 nt, synthetic construct
  source 1..19: mol_type = other RNA
atcaaaaccaaatatgata

SEQ ID NO: 538 - RNA, 19 nt, synthetic construct
  source 1..19: mol_type = other RNA
tcaaaaccaaatatgatag

SEQ ID NO: 539 - RNA, 19 nt, synthetic construct
  source 1..19: mol_type = other RNA
caaaaccaaatatgataga

SEQ ID NO: 540 - RNA, 19 nt, synthetic construct
  source 1..19: mol_type = other RNA
aaaaccaaatatgatagac

SEQ ID NO: 541 - RNA, 19 nt, synthetic construct
  source 1..19: mol_type = other RNA
aaaccaaatatgatagacg

SEQ ID NO: 542 - RNA, 19 nt, synthetic construct
  source 1..19: mol_type = other RNA
aaccaaatatgatagacgc

SEQ ID NO: 543 - RNA, 19 nt, synthetic construct
  source 1..19: mol_type = other RNA
accaaatatgatagacgct

SEQ ID NO: 544 - RNA, 19 nt, synthetic construct
  source 1..19: mol_type = other RNA
ccaaatatgatagacgctg

SEQ ID NO: 545 - RNA, 19 nt, synthetic construct
  source 1..19: mol_type = other RNA
caaatatgatagacgctgc

SEQ ID NO: 546 - RNA, 19 nt, synthetic construct
  source 1..19: mol_type = other RNA
aaatatgatagacgctgct

SEQ ID NO: 547 - RNA, 19 nt, synthetic construct
  source 1..19: mol_type = other RNA
aatatgatagacgctgcta

SEQ ID NO: 548 - RNA, 19 nt, synthetic construct
  source 1..19: mol_type = other RNA
atatgatagacgctgctac

SEQ ID NO: 549 - RNA, 19 nt, synthetic construct
  source 1..19: mol_type = other RNA
tatgatagacgctgctact

SEQ ID NO: 550 - RNA, 19 nt, synthetic construct
  source 1..19: mol_type = other RNA
atgatagacgctgctactt

SEQ ID NO: 551 - RNA, 19 nt, synthetic construct
  source 1..19: mol_type = other RNA
tgatagacgctgctacttt

SEQ ID NO: 552 - RNA, 19 nt, synthetic construct
  source 1..19: mol_type = other RNA
gatagacgctgctactttg

SEQ ID NO: 553 - RNA, 19 nt, synthetic construct
  source 1..19: mol_type = other RNA
atagacgctgctactttga

SEQ ID NO: 554 - RNA, 19 nt, synthetic construct
  source 1..19: mol_type = other RNA
tagacgctgctactttgaa

SEQ ID NO: 555 - RNA, 19 nt, synthetic construct
  source 1..19: mol_type = other RNA
agacgctgctactttgaag

SEQ ID NO: 556 - RNA, 19 nt, synthetic construct
  source 1..19: mol_type = other RNA
gacgctgctactttgaagt

SEQ ID NO: 557 - RNA, 19 nt, synthetic construct
  source 1..19: mol_type = other RNA
acgctgctactttgaagtc

SEQ ID NO: 558 - RNA, 19 nt, synthetic construct
  source 1..19: mol_type = other RNA
cgctgctactttgaagtcc

SEQ ID NO: 559 - RNA, 19 nt, synthetic construct
  source 1..19: mol_type = other RNA
gctgctactttgaagtcca

SEQ ID NO: 560 - RNA, 19 nt, synthetic construct
  source 1..19: mol_type = other RNA
ctgctactttgaagtccag

SEQ ID NO: 561 - RNA, 19 nt, synthetic construct
  source 1..19: mol_type = other RNA
tgctactttgaagtccagg

SEQ ID NO: 562 - RNA, 19 nt, synthetic construct
  source 1..19: mol_type = other RNA
gctactttgaagtccagga

SEQ ID NO: 563 - RNA, 19 nt, synthetic construct
  source 1..19: mol_type = other RNA
ctactttgaagtccaggaa

SEQ ID NO: 564 - RNA, 19 nt, synthetic construct
  source 1..19: mol_type = other RNA
tactttgaagtccaggaaa

SEQ ID NO: 565 - RNA, 19 nt, synthetic construct
  source 1..19: mol_type = other RNA
actttgaagtccaggaaaa

SEQ ID NO: 566 - RNA, 19 nt, synthetic construct
  source 1..19: mol_type = other RNA
ctttgaagtccaggaaaat

SEQ ID NO: 567 - RNA, 19 nt, synthetic construct
  source 1..19: mol_type = other RNA
tttgaagtccaggaaaatg

SEQ ID NO: 568 - RNA, 19 nt, synthetic construct
  source 1..19: mol_type = other RNA
ttgaagtccaggaaaatgt

SEQ ID NO: 569 - RNA, 19 nt, synthetic construct
  source 1..19: mol_type = other RNA
tgaagtccaggaaaatgtt

SEQ ID NO: 570 - RNA, 19 nt, synthetic construct
  source 1..19: mol_type = other RNA
gaagtccaggaaaatgtta

SEQ ID NO: 571 - RNA, 19 nt, synthetic construct
  source 1..19: mol_type = other RNA
aagtccaggaaaatgttag

SEQ ID NO: 572 - RNA, 19 nt, synthetic construct
  source 1..19: mol_type = other RNA
agtccaggaaaatgttaga

SEQ ID NO: 573 - RNA, 19 nt, synthetic construct
  source 1..19: mol_type = other RNA
gtccaggaaaatgttagaa

SEQ ID NO: 574 - RNA, 19 nt, synthetic construct
  source 1..19: mol_type = other RNA
tccaggaaaatgttagaag

SEQ ID NO: 575 - RNA, 19 nt, synthetic construct
  source 1..19: mol_type = other RNA
ccaggaaaatgttagaaga

SEQ ID NO: 576 - RNA, 19 nt, synthetic construct
  source 1..19: mol_type = other RNA
caggaaaatgttagaagaa

SEQ ID NO: 577 - RNA, 19 nt, synthetic construct
  source 1..19: mol_type = other RNA
aggaaaatgttagaagaaa

SEQ ID NO: 578 - RNA, 19 nt, synthetic construct
  source 1..19: mol_type = other RNA
ggaaaatgttagaagaaat

SEQ ID NO: 579 - RNA, 19 nt, synthetic construct
  source 1..19: mol_type = other RNA
gaaaatgttagaagaaatt

SEQ ID NO: 580 - RNA, 19 nt, synthetic construct
  source 1..19: mol_type = other RNA
aaaatgttagaagaaatta

SEQ ID NO: 581 - RNA, 19 nt, synthetic construct
  source 1..19: mol_type = other RNA
aaatgttagaagaaattat

SEQ ID NO: 582 - RNA, 19 nt, synthetic construct
  source 1..19: mol_type = other RNA
aatgttagaagaaattatg

SEQ ID NO: 583 - RNA, 19 nt, synthetic construct
  source 1..19: mol_type = other RNA
atgttagaagaaattatga

SEQ ID NO: 584 - RNA, 19 nt, synthetic construct
  source 1..19: mol_type = other RNA
tgttagaagaaattatgaa

SEQ ID NO: 585 - RNA, 19 nt, synthetic construct
  source 1..19: mol_type = other RNA
gttagaagaaattatgaaa

SEQ ID NO: 586 - RNA, 19 nt, synthetic construct
  source 1..19: mol_type = other RNA
ttagaagaaattatgaaat

SEQ ID NO: 587 - RNA, 19 nt, synthetic construct
  source 1..19: mol_type = other RNA
tagaagaaattatgaaata

SEQ ID NO: 588 - RNA, 19 nt, synthetic construct
  source 1..19: mol_type = other RNA
agaagaaattatgaaatat

SEQ ID NO: 589 - RNA, 19 nt, synthetic construct
  source 1..19: mol_type = other RNA
gaagaaattatgaaatatg

SEQ ID NO: 590 - RNA, 19 nt, synthetic construct
  source 1..19: mol_type = other RNA
aagaaattatgaaatatga

SEQ ID NO: 591 - RNA, 19 nt, synthetic construct
  source 1..19: mol_type = other RNA
agaaattatgaaatatgaa

SEQ ID NO: 592 - RNA, 19 nt, synthetic construct
  source 1..19: mol_type = other RNA
gaaattatgaaatatgaag

SEQ ID NO: 593 - RNA, 19 nt, synthetic construct
  source 1..19: mol_type = other RNA
aaattatgaaatatgaagc

SEQ ID NO: 594 - RNA, 19 nt, synthetic construct
  source 1..19: mol_type = other RNA
aattatgaaatatgaagca

SEQ ID NO: 595 - RNA, 19 nt, synthetic construct
  source 1..19: mol_type = other RNA
attatgaaatatgaagcat

SEQ ID NO: 596 - RNA, 19 nt, synthetic construct
  source 1..19: mol_type = other RNA
ttatgaaatatgaagcatc

SEQ ID NO: 597 - RNA, 19 nt, synthetic construct
  source 1..19: mol_type = other RNA
tatgaaatatgaagcatcg

SEQ ID NO: 598 - RNA, 19 nt, synthetic construct
  source 1..19: mol_type = other RNA
atgaaatatgaagcatcga

SEQ ID NO: 599 - RNA, 19 nt, synthetic construct
  source 1..19: mol_type = other RNA
tgaaatatgaagcatcgat

SEQ ID NO: 600 - RNA, 19 nt, synthetic construct
  source 1..19: mol_type = other RNA
gaaatatgaagcatcgatt

SEQ ID NO: 601 - RNA, 19 nt, synthetic construct
  source 1..19: mol_type = other RNA
aaatatgaagcatcgattt

SEQ ID NO: 602 - RNA, 19 nt, synthetic construct
  source 1..19: mol_type = other RNA
aatatgaagcatcgatttt

SEQ ID NO: 603 - RNA, 19 nt, synthetic construct
  source 1..19: mol_type = other RNA
atatgaagcatcgatttta

SEQ ID NO: 604 - RNA, 19 nt, synthetic construct
  source 1..19: mol_type = other RNA
tatgaagcatcgattttaa

SEQ ID NO: 605 - RNA, 19 nt, synthetic construct
  source 1..19: mol_type = other RNA
atgaagcatcgattttaac

SEQ ID NO: 606 - RNA, 19 nt, synthetic construct
  source 1..19: mol_type = other RNA
tgaagcatcgattttaaca

SEQ ID NO: 607 - RNA, 19 nt, synthetic construct
  source 1..19: mol_type = other RNA
gaagcatcgattttaacac

SEQ ID NO: 608 - RNA, 19 nt, synthetic construct
  source 1..19: mol_type = other RNA
aagcatcgattttaacaca

SEQ ID NO: 609 - RNA, 19 nt, synthetic construct
  source 1..19: mol_type = other RNA
agcatcgattttaacacat

SEQ ID NO: 610 - RNA, 19 nt, synthetic construct
  source 1..19: mol_type = other RNA
gcatcgattttaacacatg

SEQ ID NO: 611 - RNA, 19 nt, synthetic construct
  source 1..19: mol_type = other RNA
catcgattttaacacatga

SEQ ID NO: 612 - RNA, 19 nt, synthetic construct
  source 1..19: mol_type = other RNA
atcgattttaacacatgac

SEQ ID NO: 613 - RNA, 19 nt, synthetic construct
  source 1..19: mol_type = other RNA
tcgattttaacacatgact

SEQ ID NO: 614 - RNA, 19 nt, synthetic construct
  source 1..19: mol_type = other RNA
cgattttaacacatgactc

SEQ ID NO: 615 - RNA, 19 nt, synthetic construct
  source 1..19: mol_type = other RNA
gattttaacacatgactca

SEQ ID NO: 616 - RNA, 19 nt, synthetic construct
  source 1..19: mol_type = other RNA
attttaacacatgactcaa

SEQ ID NO: 617 - RNA, 19 nt, synthetic construct
  source 1..19: mol_type = other RNA
ttttaacacatgactcaag

SEQ ID NO: 618 - RNA, 19 nt, synthetic construct
  source 1..19: mol_type = other RNA
tttaacacatgactcaagt

SEQ ID NO: 619 - RNA, 19 nt, synthetic construct
  source 1..19: mol_type = other RNA
ttaacacatgactcaagta

SEQ ID NO: 620 - RNA, 19 nt, synthetic construct
  source 1..19: mol_type = other RNA
taacacatgactcaagtat

SEQ ID NO: 621 - RNA, 19 nt, synthetic construct
  source 1..19: mol_type = other RNA
aacacatgactcaagtatt

SEQ ID NO: 622 - RNA, 19 nt, synthetic construct
  source 1..19: mol_type = other RNA
acacatgactcaagtattc

SEQ ID NO: 623 - RNA, 19 nt, synthetic construct
  source 1..19: mol_type = other RNA
cacatgactcaagtattcg

SEQ ID NO: 624 - RNA, 19 nt, synthetic construct
  source 1..19: mol_type = other RNA
acatgactcaagtattcga

SEQ ID NO: 625 - RNA, 19 nt, synthetic construct
  source 1..19: mol_type = other RNA
catgactcaagtattcgat

SEQ ID NO: 626 - RNA, 19 nt, synthetic construct
  source 1..19: mol_type = other RNA
atgactcaagtattcgata

SEQ ID NO: 627 - RNA, 19 nt, synthetic construct
  source 1..19: mol_type = other RNA
tgactcaagtattcgatat

SEQ ID NO: 628 - RNA, 19 nt, synthetic construct
  source 1..19: mol_type = other RNA
gactcaagtattcgatatt

SEQ ID NO: 629 - RNA, 19 nt, synthetic construct
  source 1..19: mol_type = other RNA
actcaagtattcgatattt

SEQ ID NO: 630 - RNA, 19 nt, synthetic construct
  source 1..19: mol_type = other RNA
ctcaagtattcgatatttg

SEQ ID NO: 631 - RNA, 19 nt, synthetic construct
  source 1..19: mol_type = other RNA
tcaagtattcgatatttgc

SEQ ID NO: 632 - RNA, 19 nt, synthetic construct
  source 1..19: mol_type = other RNA
caagtattcgatatttgca

SEQ ID NO: 633 - RNA, 19 nt, synthetic construct
  source 1..19: mol_type = other RNA
aagtattcgatatttgcag

SEQ ID NO: 634 - RNA, 19 nt, synthetic construct
  source 1..19: mol_type = other RNA
agtattcgatatttgcagg

SEQ ID NO: 635 - RNA, 19 nt, synthetic construct
  source 1..19: mol_type = other RNA
gtattcgatatttgcagga

SEQ ID NO: 636 - RNA, 19 nt, synthetic construct
  source 1..19: mol_type = other RNA
tattcgatatttgcaggaa

SEQ ID NO: 637 - RNA, 19 nt, synthetic construct
  source 1..19: mol_type = other RNA
attcgatatttgcaggaaa

SEQ ID NO: 638 - RNA, 19 nt, synthetic construct
  source 1..19: mol_type = other RNA
ttcgatatttgcaggaaat

SEQ ID NO: 639 - RNA, 19 nt, synthetic construct
  source 1..19: mol_type = other RNA
tcgatatttgcaggaaata

SEQ ID NO: 640 - RNA, 19 nt, synthetic construct
  source 1..19: mol_type = other RNA
cgatatttgcaggaaatat

SEQ ID NO: 641 - RNA, 19 nt, synthetic construct
  source 1..19: mol_type = other RNA
gatatttgcaggaaatata

SEQ ID NO: 642 - RNA, 19 nt, synthetic construct
  source 1..19: mol_type = other RNA
atatttgcaggaaatatat

SEQ ID NO: 643 - RNA, 19 nt, synthetic construct
  source 1..19: mol_type = other RNA
tatttgcaggaaatatata

SEQ ID NO: 644 - RNA, 19 nt, synthetic construct
  source 1..19: mol_type = other RNA
atttgcaggaaatatataa

SEQ ID NO: 645 - RNA, 19 nt, synthetic construct
  source 1..19: mol_type = other RNA
tttgcaggaaatatataat

SEQ ID NO: 646 - RNA, 19 nt, synthetic construct
  source 1..19: mol_type = other RNA
ttgcaggaaatatataatt

SEQ ID NO: 647 - RNA, 19 nt, synthetic construct
  source 1..19: mol_type = other RNA
tgcaggaaatatataattc

SEQ ID NO: 648 - RNA, 19 nt, synthetic construct
  source 1..19: mol_type = other RNA
gcaggaaatatataattca

SEQ ID NO: 649 - RNA, 19 nt, synthetic construct
  source 1..19: mol_type = other RNA
caggaaatatataattcaa

SEQ ID NO: 650 - RNA, 19 nt, synthetic construct
  source 1..19: mol_type = other RNA
aggaaatatataattcaaa

SEQ ID NO: 651 - RNA, 19 nt, synthetic construct
  source 1..19: mol_type = other RNA
ggaaatatataattcaaat

SEQ ID NO: 652 - RNA, 19 nt, synthetic construct
  source 1..19: mol_type = other RNA
gaaatatataattcaaata

SEQ ID NO: 653 - RNA, 19 nt, synthetic construct
  source 1..19: mol_type = other RNA
aaatatataattcaaataa

SEQ ID NO: 654 - RNA, 19 nt, synthetic construct
  source 1..19: mol_type = other RNA
aatatataattcaaataat

SEQ ID NO: 655 - RNA, 19 nt, synthetic construct
  source 1..19: mol_type = other RNA
atatataattcaaataatc

SEQ ID NO: 656 - RNA, 19 nt, synthetic construct
  source 1..19: mol_type = other RNA
tatataattcaaataatca

SEQ ID NO: 657 - RNA, 19 nt, synthetic construct
  source 1..19: mol_type = other RNA
atataattcaaataatcaa

SEQ ID NO: 658 - RNA, 19 nt, synthetic construct
  source 1..19: mol_type = other RNA
tataattcaaataatcaaa

SEQ ID NO: 659 - RNA, 19 nt, synthetic construct
  source 1..19: mol_type = other RNA
ataattcaaataatcaaaa

SEQ ID NO: 660 - RNA, 19 nt, synthetic construct
  source 1..19: mol_type = other RNA
taattcaaataatcaaaag

SEQ ID NO: 661 - RNA, 19 nt, synthetic construct
  source 1..19: mol_type = other RNA
aattcaaataatcaaaaga

SEQ ID NO: 662 - RNA, 19 nt, synthetic construct
  source 1..19: mol_type = other RNA
attcaaataatcaaaagat

SEQ ID NO: 663 - RNA, 19 nt, synthetic construct
  source 1..19: mol_type = other RNA
ttcaaataatcaaaagatt

SEQ ID NO: 664 - RNA, 19 nt, synthetic construct
  source 1..19: mol_type = other RNA
tcaaataatcaaaagattg

SEQ ID NO: 665 - RNA, 19 nt, synthetic construct
  source 1..19: mol_type = other RNA
caaataatcaaaagattgt

SEQ ID NO: 666 - RNA, 19 nt, synthetic construct
  source 1..19: mol_type = other RNA
aaataatcaaaagattgtt

SEQ ID NO: 667 - RNA, 19 nt, synthetic construct
  source 1..19: mol_type = other RNA
aataatcaaaagattgtta

SEQ ID NO: 668 - RNA, 19 nt, synthetic construct
  source 1..19: mol_type = other RNA
ataatcaaaagattgttaa

SEQ ID NO: 669 - RNA, 19 nt, synthetic construct
  source 1..19: mol_type = other RNA
taatcaaaagattgttaac

SEQ ID NO: 670 - RNA, 19 nt, synthetic construct
  source 1..19: mol_type = other RNA
aatcaaaagattgttaacc

SEQ ID NO: 671 - RNA, 19 nt, synthetic construct
  source 1..19: mol_type = other RNA
atcaaaagattgttaacct

SEQ ID NO: 672 - RNA, 19 nt, synthetic construct
  source 1..19: mol_type = other RNA
tcaaaagattgttaacctg

SEQ ID NO: 673 - RNA, 19 nt, synthetic construct
  source 1..19: mol_type = other RNA
caaaagattgttaacctga

SEQ ID NO: 674 - RNA, 19 nt, synthetic construct
  source 1..19: mol_type = other RNA
aaaagattgttaacctgaa

SEQ ID NO: 675 - RNA, 19 nt, synthetic construct
  source 1..19: mol_type = other RNA
aaagattgttaacctgaaa

SEQ ID NO: 676 - RNA, 19 nt, synthetic construct
  source 1..19: mol_type = other RNA
aagattgttaacctgaaag

SEQ ID NO: 677 - RNA, 19 nt, synthetic construct
  source 1..19: mol_type = other RNA
agattgttaacctgaaaga

SEQ ID NO: 678 - RNA, 19 nt, synthetic construct
  source 1..19: mol_type = other RNA
gattgttaacctgaaagag

SEQ ID NO: 679 - RNA, 19 nt, synthetic construct
  source 1..19: mol_type = other RNA
attgttaacctgaaagaga

SEQ ID NO: 680 - RNA, 19 nt, synthetic construct
  source 1..19: mol_type = other RNA
ttgttaacctgaaagagaa

SEQ ID NO: 681 - RNA, 19 nt, synthetic construct
  source 1..19: mol_type = other RNA
tgttaacctgaaagagaag

SEQ ID NO: 682 - RNA, 19 nt, synthetic construct
  source 1..19: mol_type = other RNA
gttaacctgaaagagaagg

SEQ ID NO: 683 - RNA, 19 nt, synthetic construct
  source 1..19: mol_type = other RNA
ttaacctgaaagagaaggt

SEQ ID NO: 684 - RNA, 19 nt, synthetic construct
  source 1..19: mol_type = other RNA
taacctgaaagagaaggta

SEQ ID NO: 685 - RNA, 19 nt, synthetic construct
  source 1..19: mol_type = other RNA
aacctgaaagagaaggtag

SEQ ID NO: 686 - RNA, 19 nt, synthetic construct
  source 1..19: mol_type = other RNA
acctgaaagagaaggtagc

SEQ ID NO: 687 - RNA, 19 nt, synthetic construct
  source 1..19: mol_type = other RNA
cctgaaagagaaggtagcc

SEQ ID NO: 688 - RNA, 19 nt, synthetic construct
  source 1..19: mol_type = other RNA
ctgaaagagaaggtagccc

SEQ ID NO: 689 - RNA, 19 nt, synthetic construct
  source 1..19: mol_type = other RNA
tgaaagagaaggtagccca

SEQ ID NO: 690 - RNA, 19 nt, synthetic construct
  source 1..19: mol_type = other RNA
gaaagagaaggtagcccag

SEQ ID NO: 691 - RNA, 19 nt, synthetic construct
  source 1..19: mol_type = other RNA
aaagagaaggtagcccagc

SEQ ID NO: 692 - RNA, 19 nt, synthetic construct
  source 1..19: mol_type = other RNA
aagagaaggtagcccagct

SEQ ID NO: 693 - RNA, 19 nt, synthetic construct
  source 1..19: mol_type = other RNA
agagaaggtagcccagctt

SEQ ID NO: 694 - RNA, 19 nt, synthetic construct
  source 1..19: mol_type = other RNA
gagaaggtagcccagcttg

SEQ ID NO: 695 - RNA, 19 nt, synthetic construct
  source 1..19: mol_type = other RNA
agaaggtagcccagcttga

SEQ ID NO: 696 - RNA, 19 nt, synthetic construct
  source 1..19: mol_type = other RNA
gaaggtagcccagcttgaa

SEQ ID NO: 697 - RNA, 19 nt, synthetic construct
  source 1..19: mol_type = other RNA
aaggtagcccagcttgaag

SEQ ID NO: 698 - RNA, 19 nt, synthetic construct
  source 1..19: mol_type = other RNA
aggtagcccagcttgaagc

SEQ ID NO: 699 - RNA, 19 nt, synthetic construct
  source 1..19: mol_type = other RNA
ggtagcccagcttgaagca

SEQ ID NO: 700 - RNA, 19 nt, synthetic construct
  source 1..19: mol_type = other RNA
gtagcccagcttgaagcac

SEQ ID NO: 701 - RNA, 19 nt, synthetic construct
  source 1..19: mol_type = other RNA
tagcccagcttgaagcaca

SEQ ID NO: 702 - RNA, 19 nt, synthetic construct
  source 1..19: mol_type = other RNA
agcccagcttgaagcacag

SEQ ID NO: 703 - RNA, 19 nt, synthetic construct
  source 1..19: mol_type = other RNA
gcccagcttgaagcacagt

SEQ ID NO: 704 - RNA, 19 nt, synthetic construct
  source 1..19: mol_type = other RNA
cccagcttgaagcacagtg

SEQ ID NO: 705 - RNA, 19 nt, synthetic construct
  source 1..19: mol_type = other RNA
ccagcttgaagcacagtgc

SEQ ID NO: 706 - RNA, 19 nt, synthetic construct
  source 1..19: mol_type = other RNA
cagcttgaagcacagtgcc

SEQ ID NO: 707 - RNA, 19 nt, synthetic construct
  source 1..19: mol_type = other RNA
agcttgaagcacagtgcca

SEQ ID NO: 708 - RNA, 19 nt, synthetic construct
  source 1..19: mol_type = other RNA
gcttgaagcacagtgccag

SEQ ID NO: 709 - RNA, 19 nt, synthetic construct
  source 1..19: mol_type = other RNA
cttgaagcacagtgccagg

SEQ ID NO: 710 - RNA, 19 nt, synthetic construct
  source 1..19: mol_type = other RNA
ttgaagcacagtgccagga

SEQ ID NO: 711 - RNA, 19 nt, synthetic construct
  source 1..19: mol_type = other RNA
tgaagcacagtgccaggaa

SEQ ID NO: 712 - RNA, 19 nt, synthetic construct
  source 1..19: mol_type = other RNA
gaagcacagtgccaggaac

SEQ ID NO: 713 - RNA, 19 nt, synthetic construct
  source 1..19: mol_type = other RNA
aagcacagtgccaggaacc

SEQ ID NO: 714 - RNA, 19 nt, synthetic construct
  source 1..19: mol_type = other RNA
agcacagtgccaggaacct

SEQ ID NO: 715 - RNA, 19 nt, synthetic construct
  source 1..19: mol_type = other RNA
gcacagtgccaggaacctt

SEQ ID NO: 716 - RNA, 19 nt, synthetic construct
  source 1..19: mol_type = other RNA
cacagtgccaggaaccttg

SEQ ID NO: 717 - RNA, 19 nt, synthetic construct
  source 1..19: mol_type = other RNA
acagtgccaggaaccttgc

SEQ ID NO: 718 - RNA, 19 nt, synthetic construct
  source 1..19: mol_type = other RNA
cagtgccaggaaccttgca

SEQ ID NO: 719 - RNA, 38 nt, synthetic construct
  source 1..38: mol_type = other RNA
agtgccaggaaccttgcaaagtgccaggaaccttgcaa

SEQ ID NO: 720 - RNA, 19 nt, synthetic construct
  source 1..19: mol_type = other RNA
gtgccaggaaccttgcaaa

SEQ ID NO: 721 - RNA, 19 nt, synthetic construct
  source 1..19: mol_type = other RNA
tgccaggaaccttgcaaag

SEQ ID NO: 722 - RNA, 19 nt, synthetic construct
  source 1..19: mol_type = other RNA
gccaggaaccttgcaaaga

SEQ ID NO: 723 - RNA, 19 nt, synthetic construct
  source 1..19: mol_type = other RNA
ccaggaaccttgcaaagac

SEQ ID NO: 724 - RNA, 19 nt, synthetic construct
  source 1..19: mol_type = other RNA
caggaaccttgcaaagaca

SEQ ID NO: 725 - RNA, 19 nt, synthetic construct
  source 1..19: mol_type = other RNA
aggaaccttgcaaagacac

SEQ ID NO: 726 - RNA, 19 nt, synthetic construct
  source 1..19: mol_type = other RNA
ggaaccttgcaaagacacg

SEQ ID NO: 727 - RNA, 19 nt, synthetic construct
  source 1..19: mol_type = other RNA
gaaccttgcaaagacacgg

SEQ ID NO: 728 - RNA, 19 nt, synthetic construct
  source 1..19: mol_type = other RNA
aaccttgcaaagacacggt

SEQ ID NO: 729 - RNA, 19 nt, synthetic construct
  source 1..19: mol_type = other RNA
accttgcaaagacacggtg

SEQ ID NO: 730 - RNA, 19 nt, synthetic construct
  source 1..19: mol_type = other RNA
ccttgcaaagacacggtgc

SEQ ID NO: 731 - RNA, 19 nt, synthetic construct
  source 1..19: mol_type = other RNA
cttgcaaagacacggtgca

SEQ ID NO: 732 - RNA, 19 nt, synthetic construct
  source 1..19: mol_type = other RNA
ttgcaaagacacggtgcaa

SEQ ID NO: 733 - RNA, 19 nt, synthetic construct
  source 1..19: mol_type = other RNA
tgcaaagacacggtgcaaa

SEQ ID NO: 734 - RNA, 19 nt, synthetic construct
  source 1..19: mol_type = other RNA
gcaaagacacggtgcaaat

SEQ ID NO: 735 - RNA, 19 nt, synthetic construct
  source 1..19: mol_type = other RNA
caaagacacggtgcaaatc

SEQ ID NO: 736 - RNA, 19 nt, synthetic construct
  source 1..19: mol_type = other RNA
aaagacacggtgcaaatcc

SEQ ID NO: 737 - RNA, 19 nt, synthetic construct
  source 1..19: mol_type = other RNA
aagacacggtgcaaatcca

SEQ ID NO: 738 - RNA, 19 nt, synthetic construct
  source 1..19: mol_type = other RNA
agacacggtgcaaatccat

SEQ ID NO: 739 - RNA, 19 nt, synthetic construct
  source 1..19: mol_type = other RNA
gacacggtgcaaatccatg

SEQ ID NO: 740 - RNA, 19 nt, synthetic construct
  source 1..19: mol_type = other RNA
acacggtgcaaatccatga

SEQ ID NO: 741 - RNA, 19 nt, synthetic construct
  source 1..19: mol_type = other RNA
cacggtgcaaatccatgat

SEQ ID NO: 742 - RNA, 19 nt, synthetic construct
  source 1..19: mol_type = other RNA
acggtgcaaatccatgata

SEQ ID NO: 743 - RNA, 19 nt, synthetic construct
  source 1..19: mol_type = other RNA
cggtgcaaatccatgatat

SEQ ID NO: 744 - RNA, 19 nt, synthetic construct
  source 1..19: mol_type = other RNA
ggtgcaaatccatgatatc

SEQ ID NO: 745 - RNA, 19 nt, synthetic construct
  source 1..19: mol_type = other RNA
gtgcaaatccatgatatca

SEQ ID NO: 746 - RNA, 19 nt, synthetic construct
  source 1..19: mol_type = other RNA
tgcaaatccatgatatcac

SEQ ID NO: 747 - RNA, 19 nt, synthetic construct
  source 1..19: mol_type = other RNA
gcaaatccatgatatcact

SEQ ID NO: 748 - RNA, 19 nt, synthetic construct
  source 1..19: mol_type = other RNA
caaatccatgatatcactg

SEQ ID NO: 749 - RNA, 19 nt, synthetic construct
  source 1..19: mol_type = other RNA
aaatccatgatatcactgg

SEQ ID NO: 750 - RNA, 19 nt, synthetic construct
  source 1..19: mol_type = other RNA
aatccatgatatcactggg

SEQ ID NO: 751 - RNA, 19 nt, synthetic construct
  source 1..19: mol_type = other RNA
atccatgatatcactggga

SEQ ID NO: 752 - RNA, 19 nt, synthetic construct
  source 1..19: mol_type = other RNA
tccatgatatcactgggaa

SEQ ID NO: 753 - RNA, 19 nt, synthetic construct
  source 1..19: mol_type = other RNA
ccatgatatcactgggaaa

SEQ ID NO: 754 - RNA, 19 nt, synthetic construct
  source 1..19: mol_type = other RNA
catgatatcactgggaaag

SEQ ID NO: 755 - RNA, 19 nt, synthetic construct
  source 1..19: mol_type = other RNA
atgatatcactgggaaaga

SEQ ID NO: 756 - RNA, 19 nt, synthetic construct
  source 1..19: mol_type = other RNA
tgatatcactgggaaagat

SEQ ID NO: 757 - RNA, 19 nt, synthetic construct
  source 1..19: mol_type = other RNA
gatatcactgggaaagatt

SEQ ID NO: 758 - RNA, 19 nt, synthetic construct
  source 1..19: mol_type = other RNA
atatcactgggaaagattg

SEQ ID NO: 759 - RNA, 19 nt, synthetic construct
  source 1..19: mol_type = other RNA
tatcactgggaaagattgt

SEQ ID NO: 760 - RNA, 19 nt, synthetic construct
  source 1..19: mol_type = other RNA
atcactgggaaagattgtc

SEQ ID NO: 761 - RNA, 19 nt, synthetic construct
  source 1..19: mol_type = other RNA
tcactgggaaagattgtca

SEQ ID NO: 762 - RNA, 19 nt, synthetic construct
  source 1..19: mol_type = other RNA
cactgggaaagattgtcaa

SEQ ID NO: 763 - RNA, 19 nt, synthetic construct
  source 1..19: mol_type = other RNA
actgggaaagattgtcaag

SEQ ID NO: 764 - RNA, 19 nt, synthetic construct
  source 1..19: mol_type = other RNA
ctgggaaagattgtcaaga

SEQ ID NO: 765 - RNA, 19 nt, synthetic construct
  source 1..19: mol_type = other RNA
tgggaaagattgtcaagac

SEQ ID NO: 766 - RNA, 19 nt, synthetic construct
  source 1..19: mol_type = other RNA
gggaaagattgtcaagaca

SEQ ID NO: 767 - RNA, 19 nt, synthetic construct
  source 1..19: mol_type = other RNA
ggaaagattgtcaagacat

SEQ ID NO: 768 - RNA, 19 nt, synthetic construct
  source 1..19: mol_type = other RNA
gaaagattgtcaagacatt

SEQ ID NO: 769 - RNA, 19 nt, synthetic construct
  source 1..19: mol_type = other RNA
aaagattgtcaagacattg

SEQ ID NO: 770 - RNA, 19 nt, synthetic construct
  source 1..19: mol_type = other RNA
aagattgtcaagacattgc

SEQ ID NO: 771 - RNA, 19 nt, synthetic construct
  source 1..19: mol_type = other RNA
agattgtcaagacattgcc

SEQ ID NO: 772 - RNA, 19 nt, synthetic construct
  source 1..19: mol_type = other RNA
gattgtcaagacattgcca

SEQ ID NO: 773 - RNA, 19 nt, synthetic construct
  source 1..19: mol_type = other RNA
attgtcaagacattgccaa

SEQ ID NO: 774 - RNA, 19 nt, synthetic construct
  source 1..19: mol_type = other RNA
ttgtcaagacattgccaat

SEQ ID NO: 775 - RNA, 19 nt, synthetic construct
  source 1..19: mol_type = other RNA
tgtcaagacattgccaata

SEQ ID NO: 776 - RNA, 19 nt, synthetic construct
  source 1..19: mol_type = other RNA
gtcaagacattgccaataa

SEQ ID NO: 777 - RNA, 19 nt, synthetic construct
  source 1..19: mol_type = other RNA
tcaagacattgccaataag

SEQ ID NO: 778 - RNA, 19 nt, synthetic construct
  source 1..19: mol_type = other RNA
caagacattgccaataagg

SEQ ID NO: 779 - RNA, 19 nt, synthetic construct
  source 1..19: mol_type = other RNA
aagacattgccaataaggg

SEQ ID NO: 780 - RNA, 19 nt, synthetic construct
  source 1..19: mol_type = other RNA
agacattgccaataaggga

SEQ ID NO: 781 - RNA, 19 nt, synthetic construct
  source 1..19: mol_type = other RNA
gacattgccaataagggag

SEQ ID NO: 782 - RNA, 19 nt, synthetic construct
  source 1..19: mol_type = other RNA
acattgccaataagggagc

SEQ ID NO: 783 - RNA, 19 nt, synthetic construct
  source 1..19: mol_type = other RNA
cattgccaataagggagct

SEQ ID NO: 784 - RNA, 19 nt, synthetic construct
  source 1..19: mol_type = other RNA
attgccaataagggagcta

SEQ ID NO: 785 - RNA, 19 nt, synthetic construct
  source 1..19: mol_type = other RNA
ttgccaataagggagctaa

SEQ ID NO: 786 - RNA, 19 nt, synthetic construct
  source 1..19: mol_type = other RNA
tgccaataagggagctaaa

SEQ ID NO: 787 - RNA, 19 nt, synthetic construct
  source 1..19: mol_type = other RNA
gccaataagggagctaaac

SEQ ID NO: 788 - RNA, 19 nt, synthetic construct
  source 1..19: mol_type = other RNA
ccaataagggagctaaaca

SEQ ID NO: 789 - RNA, 19 nt, synthetic construct
  source 1..19: mol_type = other RNA
caataagggagctaaacag

SEQ ID NO: 790 - RNA, 19 nt, synthetic construct
  source 1..19: mol_type = other RNA
aataagggagctaaacaga

SEQ ID NO: 791 - RNA, 19 nt, synthetic construct
  source 1..19: mol_type = other RNA
ataagggagctaaacagag

SEQ ID NO: 792 - RNA, 19 nt, synthetic construct
  source 1..19: mol_type = other RNA
taagggagctaaacagagc

SEQ ID NO: 793 - RNA, 19 nt, synthetic construct
  source 1..19: mol_type = other RNA
aagggagctaaacagagcg

SEQ ID NO: 794 - RNA, 19 nt, synthetic construct
  source 1..19: mol_type = other RNA
agggagctaaacagagcgg

SEQ ID NO: 795 - RNA, 19 nt, synthetic construct
  source 1..19: mol_type = other RNA
gggagctaaacagagcggg

SEQ ID NO: 796 - RNA, 19 nt, synthetic construct
  source 1..19: mol_type = other RNA
ggagctaaacagagcgggc

SEQ ID NO: 797 - RNA, 19 nt, synthetic construct
  source 1..19: mol_type = other RNA
gagctaaacagagcgggct

SEQ ID NO: 798 - RNA, 19 nt, synthetic construct
  source 1..19: mol_type = other RNA
agctaaacagagcgggctt

SEQ ID NO: 799 - RNA, 19 nt, synthetic construct
  source 1..19: mol_type = other RNA
gctaaacagagcgggcttt

SEQ ID NO: 800 - RNA, 19 nt, synthetic construct
  source 1..19: mol_type = other RNA
ctaaacagagcgggcttta

SEQ ID NO: 801 - RNA, 19 nt, synthetic construct
  source 1..19: mol_type = other RNA
taaacagagcgggctttac

SEQ ID NO: 802 - RNA, 19 nt, synthetic construct
  source 1..19: mol_type = other RNA
aaacagagcgggctttact

SEQ ID NO: 803 - RNA, 19 nt, synthetic construct
  source 1..19: mol_type = other RNA
aacagagcgggctttactt

SEQ ID NO: 804 - RNA, 19 nt, synthetic construct
  source 1..19: mol_type = other RNA
acagagcgggctttacttt

SEQ ID NO: 805 - RNA, 19 nt, synthetic construct
  source 1..19: mol_type = other RNA
cagagcgggctttacttta

SEQ ID NO: 806 - RNA, 19 nt, synthetic construct
  source 1..19: mol_type = other RNA
agagcgggctttactttat

SEQ ID NO: 807 - RNA, 19 nt, synthetic construct
  source 1..19: mol_type = other RNA
gagcgggctttactttatt

SEQ ID NO: 808 - RNA, 19 nt, synthetic construct
  source 1..19: mol_type = other RNA
agcgggctttactttatta

SEQ ID NO: 809 - RNA, 19 nt, synthetic construct
  source 1..19: mol_type = other RNA
gcgggctttactttattaa

SEQ ID NO: 810 - RNA, 19 nt, synthetic construct
  source 1..19: mol_type = other RNA
cgggctttactttattaaa

SEQ ID NO: 811 - RNA, 19 nt, synthetic construct
  source 1..19: mol_type = other RNA
gggctttactttattaaac

SEQ ID NO: 812 - RNA, 19 nt, synthetic construct
  source 1..19: mol_type = other RNA
ggctttactttattaaacc

SEQ ID NO: 813 - RNA, 19 nt, synthetic construct
  source 1..19: mol_type = other RNA
gctttactttattaaacct

SEQ ID NO: 814 - RNA, 19 nt, synthetic construct
  source 1..19: mol_type = other RNA
ctttactttattaaacctc

SEQ ID NO: 815 - RNA, 19 nt, synthetic construct
  source 1..19: mol_type = other RNA
tttactttattaaacctct

SEQ ID NO: 816 - RNA, 19 nt, synthetic construct
  source 1..19: mol_type = other RNA
ttactttattaaacctctg

SEQ ID NO: 817 - RNA, 19 nt, synthetic construct
  source 1..19: mol_type = other RNA
tactttattaaacctctga

SEQ ID NO: 818 - RNA, 19 nt, synthetic construct
  source 1..19: mol_type = other RNA
actttattaaacctctgaa

SEQ ID NO: 819 - RNA, 19 nt, synthetic construct
  source 1..19: mol_type = other RNA
ctttattaaacctctgaaa

SEQ ID NO: 820 - RNA, 19 nt, synthetic construct
  source 1..19: mol_type = other RNA
tttattaaacctctgaaag

SEQ ID NO: 821 - RNA, 19 nt, synthetic construct
  source 1..19: mol_type = other RNA
ttattaaacctctgaaagc

SEQ ID NO: 822 - RNA, 19 nt, synthetic construct
  source 1..19: mol_type = other RNA
tattaaacctctgaaagct

SEQ ID NO: 823 - RNA, 19 nt, synthetic construct
  source 1..19: mol_type = other RNA
attaaacctctgaaagcta

SEQ ID NO: 824 - RNA, 19 nt, synthetic construct
  source 1..19: mol_type = other RNA
ttaaacctctgaaagctaa

SEQ ID NO: 825 - RNA, 19 nt, synthetic construct
  source 1..19: mol_type = other RNA
taaacctctgaaagctaac

SEQ ID NO: 826 - RNA, 19 nt, synthetic construct
  source 1..19: mol_type = other RNA
aaacctctgaaagctaacc

SEQ ID NO: 827 - RNA, 19 nt, synthetic construct
  source 1..19: mol_type = other RNA
aacctctgaaagctaacca

SEQ ID NO: 828 - RNA, 19 nt, synthetic construct
  source 1..19: mol_type = other RNA
acctctgaaagctaaccag

SEQ ID NO: 829 - RNA, 19 nt, synthetic construct
  source 1..19: mol_type = other RNA
cctctgaaagctaaccagc

SEQ ID NO: 830 - RNA, 19 nt, synthetic construct
  source 1..19: mol_type = other RNA
ctctgaaagctaaccagca

SEQ ID NO: 831 - RNA, 19 nt, synthetic construct
  source 1..19: mol_type = other RNA
tctgaaagctaaccagcaa

SEQ ID NO: 832 - RNA, 19 nt, synthetic construct
  source 1..19: mol_type = other RNA
ctgaaagctaaccagcaat

SEQ ID NO: 833 - RNA, 19 nt, synthetic construct
  source 1..19: mol_type = other RNA
tgaaagctaaccagcaatt

SEQ ID NO: 834 - RNA, 19 nt, synthetic construct
  source 1..19: mol_type = other RNA
gaaagctaaccagcaattc

SEQ ID NO: 835 - RNA, 19 nt, synthetic construct
  source 1..19: mol_type = other RNA
aaagctaaccagcaattct

SEQ ID NO: 836 - RNA, 19 nt, synthetic construct
  source 1..19: mol_type = other RNA
aagctaaccagcaattctt

SEQ ID NO: 837 - RNA, 19 nt, synthetic construct
  source 1..19: mol_type = other RNA
agctaaccagcaattctta

SEQ ID NO: 838 - RNA, 19 nt, synthetic construct
  source 1..19: mol_type = other RNA
gctaaccagcaattcttag

SEQ ID NO: 839 - RNA, 19 nt, synthetic construct
  source 1..19: mol_type = other RNA
ctaaccagcaattcttagt

SEQ ID NO: 840 - RNA, 19 nt, synthetic construct
  source 1..19: mol_type = other RNA
taaccagcaattcttagtc

SEQ ID NO: 841 - RNA, 19 nt, synthetic construct
  source 1..19: mol_type = other RNA
aaccagcaattcttagtct

SEQ ID NO: 842 - RNA, 19 nt, synthetic construct
  source 1..19: mol_type = other RNA
accagcaattcttagtcta

SEQ ID NO: 843 - RNA, 19 nt, synthetic construct
  source 1..19: mol_type = other RNA
ccagcaattcttagtctac

SEQ ID NO: 844 - RNA, 19 nt, synthetic construct
  source 1..19: mol_type = other RNA
cagcaattcttagtctact

SEQ ID NO: 845 - RNA, 19 nt, synthetic construct
  source 1..19: mol_type = other RNA
agcaattcttagtctactg

SEQ ID NO: 846 - RNA, 19 nt, synthetic construct
  source 1..19: mol_type = other RNA
gcaattcttagtctactgt

SEQ ID NO: 847 - RNA, 19 nt, synthetic construct
  source 1..19: mol_type = other RNA
caattcttagtctactgtg

SEQ ID NO: 848 - RNA, 19 nt, synthetic construct
  source 1..19: mol_type = other RNA
aattcttagtctactgtga

SEQ ID NO: 849 - RNA, 19 nt, synthetic construct
  source 1..19: mol_type = other RNA
attcttagtctactgtgaa

SEQ ID NO: 850 - RNA, 19 nt, synthetic construct
  source 1..19: mol_type = other RNA
ttcttagtctactgtgaaa

SEQ ID NO: 851 - RNA, 19 nt, synthetic construct
  source 1..19: mol_type = other RNA
tcttagtctactgtgaaat

SEQ ID NO: 852 - RNA, 19 nt, synthetic construct
  source 1..19: mol_type = other RNA
cttagtctactgtgaaatc

SEQ ID NO: 853 - RNA, 19 nt, synthetic construct
  source 1..19: mol_type = other RNA
ttagtctactgtgaaatcg

SEQ ID NO: 854 - RNA, 19 nt, synthetic construct
  source 1..19: mol_type = other RNA
tagtctactgtgaaatcga

SEQ ID NO: 855 - RNA, 19 nt, synthetic construct
  source 1..19: mol_type = other RNA
agtctactgtgaaatcgat

SEQ ID NO: 856 - RNA, 19 nt, synthetic construct
  source 1..19: mol_type = other RNA
gtctactgtgaaatcgatg

SEQ ID NO: 857 - RNA, 19 nt, synthetic construct
  source 1..19: mol_type = other RNA
tctactgtgaaatcgatgg

SEQ ID NO: 858 - RNA, 19 nt, synthetic construct
  source 1..19: mol_type = other RNA
ctactgtgaaatcgatggg

SEQ ID NO: 859 - RNA, 19 nt, synthetic construct
  source 1..19: mol_type = other RNA
tactgtgaaatcgatgggt

SEQ ID NO: 860 - RNA, 19 nt, synthetic construct
  source 1..19: mol_type = other RNA
actgtgaaatcgatgggtc

SEQ ID NO: 861 - RNA, 19 nt, synthetic construct
  source 1..19: mol_type = other RNA
ctgtgaaatcgatgggtct

SEQ ID NO: 862 - RNA, 19 nt, synthetic construct
  source 1..19: mol_type = other RNA
tgtgaaatcgatgggtctg

SEQ ID NO: 863 - RNA, 19 nt, synthetic construct
  source 1..19: mol_type = other RNA
gtgaaatcgatgggtctgg

SEQ ID NO: 864 - RNA, 19 nt, synthetic construct
  source 1..19: mol_type = other RNA
tgaaatcgatgggtctgga

SEQ ID NO: 865 - RNA, 19 nt, synthetic construct
  source 1..19: mol_type = other RNA
gaaatcgatgggtctggaa

SEQ ID NO: 866 - RNA, 19 nt, synthetic construct
  source 1..19: mol_type = other RNA
aaatcgatgggtctggaaa

SEQ ID NO: 867 - RNA, 19 nt, synthetic construct
  source 1..19: mol_type = other RNA
aatcgatgggtctggaaat

SEQ ID NO: 868 - RNA, 19 nt, synthetic construct
  source 1..19: mol_type = other RNA
atcgatgggtctggaaatg

SEQ ID NO: 869 - RNA, 19 nt, synthetic construct
  source 1..19: mol_type = other RNA
tcgatgggtctggaaatgg

SEQ ID NO: 870 - RNA, 19 nt, synthetic construct
  source 1..19: mol_type = other RNA
cgatgggtctggaaatgga

SEQ ID NO: 871 - RNA, 19 nt, synthetic construct
  source 1..19: mol_type = other RNA
gatgggtctggaaatggat

SEQ ID NO: 872 - RNA, 19 nt, synthetic construct
  source 1..19: mol_type = other RNA
atgggtctggaaatggatg

SEQ ID NO: 873 - RNA, 19 nt, synthetic construct
  source 1..19: mol_type = other RNA
tgggtctggaaatggatgg

SEQ ID NO: 874 - RNA, 19 nt, synthetic construct
  source 1..19: mol_type = other RNA
gggtctggaaatggatgga

SEQ ID NO: 875 - RNA, 19 nt, synthetic construct
  source 1..19: mol_type = other RNA
ggtctggaaatggatggac

SEQ ID NO: 876 - RNA, 19 nt, synthetic construct
  source 1..19: mol_type = other RNA
gtctggaaatggatggact

SEQ ID NO: 877 - RNA, 19 nt, synthetic construct
  source 1..19: mol_type = other RNA
tctggaaatggatggactg

SEQ ID NO: 878 - RNA, 19 nt, synthetic construct
  source 1..19: mol_type = other RNA
ctggaaatggatggactgt

SEQ ID NO: 879 - RNA, 19 nt, synthetic construct
  source 1..19: mol_type = other RNA
tggaaatggatggactgtg

SEQ ID NO: 880 - RNA, 19 nt, synthetic construct
  source 1..19: mol_type = other RNA
ggaaatggatggactgtgt

SEQ ID NO: 881 - RNA, 19 nt, synthetic construct
  source 1..19: mol_type = other RNA
gaaatggatggactgtgtt

SEQ ID NO: 882 - RNA, 19 nt, synthetic construct
  source 1..19: mol_type = other RNA
aaatggatggactgtgttt

SEQ ID NO: 883 - RNA, 19 nt, synthetic construct
  source 1..19: mol_type = other RNA
aatggatggactgtgtttc

SEQ ID NO: 884 - RNA, 19 nt, synthetic construct
  source 1..19: mol_type = other RNA
atggatggactgtgtttca

SEQ ID NO: 885 - RNA, 19 nt, synthetic construct
  source 1..19: mol_type = other RNA
tggatggactgtgtttcag

SEQ ID NO: 886 - RNA, 19 nt, synthetic construct
  source 1..19: mol_type = other RNA
ggatggactgtgtttcaga

SEQ ID NO: 887 - RNA, 19 nt, synthetic construct
  source 1..19: mol_type = other RNA
gatggactgtgtttcagaa

SEQ ID NO: 888 - RNA, 19 nt, synthetic construct
  source 1..19: mol_type = other RNA
atggactgtgtttcagaag

SEQ ID NO: 889 - RNA, 19 nt, synthetic construct
  source 1..19: mol_type = other RNA
tggactgtgtttcagaaga

SEQ ID NO: 890 - RNA, 19 nt, synthetic construct
  source 1..19: mol_type = other RNA
ggactgtgtttcagaagag

SEQ ID NO: 891 - RNA, 19 nt, synthetic construct
  source 1..19: mol_type = other RNA
gactgtgtttcagaagaga

SEQ ID NO: 892 - RNA, 19 nt, synthetic construct
  source 1..19: mol_type = other RNA
actgtgtttcagaagagac

SEQ ID NO: 893 - RNA, 19 nt, synthetic construct
  source 1..19: mol_type = other RNA
ctgtgtttcagaagagact

SEQ ID NO: 894 - RNA, 19 nt, synthetic construct
  source 1..19: mol_type = other RNA
tgtgtttcagaagagactt

SEQ ID NO: 895 - RNA, 19 nt, synthetic construct
  source 1..19: mol_type = other RNA
gtgtttcagaagagacttg

SEQ ID NO: 896 - RNA, 19 nt, synthetic construct
  source 1..19: mol_type = other RNA
tgtttcagaagagacttga

SEQ ID NO: 897 - RNA, 19 nt, synthetic construct
  source 1..19: mol_type = other RNA
gtttcagaagagacttgat

SEQ ID NO: 898 - RNA, 19 nt, synthetic construct
  source 1..19: mol_type = other RNA
tttcagaagagacttgatg

SEQ ID NO: 899 - RNA, 19 nt, synthetic construct
  source 1..19: mol_type = other RNA
ttcagaagagacttgatgg

SEQ ID NO: 900 - RNA, 19 nt, synthetic construct
  source 1..19: mol_type = other RNA
tcagaagagacttgatggc

SEQ ID NO: 901 - RNA, 19 nt, synthetic construct
  source 1..19: mol_type = other RNA
cagaagagacttgatggca

SEQ ID NO: 902 - RNA, 19 nt, synthetic construct
  source 1..19: mol_type = other RNA
agaagagacttgatggcag

SEQ ID NO: 903 - RNA, 19 nt, synthetic construct
  source 1..19: mol_type = other RNA
gaagagacttgatggcagt

SEQ ID NO: 904 - RNA, 19 nt, synthetic construct
  source 1..19: mol_type = other RNA
aagagacttgatggcagtg

SEQ ID NO: 905 - RNA, 19 nt, synthetic construct
  source 1..19: mol_type = other RNA
agagacttgatggcagtgt

SEQ ID NO: 906 - RNA, 19 nt, synthetic construct
  source 1..19: mol_type = other RNA
gagacttgatggcagtgta

SEQ ID NO: 907 - RNA, 19 nt, synthetic construct
  source 1..19: mol_type = other RNA
agacttgatggcagtgtag

SEQ ID NO: 908 - RNA, 19 nt, synthetic construct
  source 1..19: mol_type = other RNA
gacttgatggcagtgtaga

SEQ ID NO: 909 - RNA, 19 nt, synthetic construct
  source 1..19: mol_type = other RNA
acttgatggcagtgtagat

SEQ ID NO: 910 - RNA, 19 nt, synthetic construct
  source 1..19: mol_type = other RNA
cttgatggcagtgtagatt

SEQ ID NO: 911 - RNA, 19 nt, synthetic construct
  source 1..19: mol_type = other RNA
ttgatggcagtgtagattt

SEQ ID NO: 912 - RNA, 19 nt, synthetic construct
  source 1..19: mol_type = other RNA
tgatggcagtgtagatttc

SEQ ID NO: 913 - RNA, 19 nt, synthetic construct
  source 1..19: mol_type = other RNA
gatggcagtgtagatttca

SEQ ID NO: 914 - RNA, 19 nt, synthetic construct
  source 1..19: mol_type = other RNA
atggcagtgtagatttcaa

SEQ ID NO: 915 - RNA, 19 nt, synthetic construct
  source 1..19: mol_type = other RNA
tggcagtgtagatttcaag

SEQ ID NO: 916 - RNA, 19 nt, synthetic construct
  source 1..19: mol_type = other RNA
ggcagtgtagatttcaaga

SEQ ID NO: 917 - RNA, 19 nt, synthetic construct
  source 1..19: mol_type = other RNA
gcagtgtagatttcaagaa

SEQ ID NO: 918 - RNA, 19 nt, synthetic construct
  source 1..19: mol_type = other RNA
cagtgtagatttcaagaaa

SEQ ID NO: 919 - RNA, 19 nt, synthetic construct
  source 1..19: mol_type = other RNA
agtgtagatttcaagaaaa

SEQ ID NO: 920 - RNA, 19 nt, synthetic construct
  source 1..19: mol_type = other RNA
gtgtagatttcaagaaaaa

SEQ ID NO: 921 - RNA, 19 nt, synthetic construct
  source 1..19: mol_type = other RNA
tgtagatttcaagaaaaac

SEQ ID NO: 922 - RNA, 19 nt, synthetic construct
  source 1..19: mol_type = other RNA
gtagatttcaagaaaaact

SEQ ID NO: 923 - RNA, 19 nt, synthetic construct
  source 1..19: mol_type = other RNA
tagatttcaagaaaaactg

SEQ ID NO: 924 - RNA, 19 nt, synthetic construct
  source 1..19: mol_type = other RNA
agatttcaagaaaaactgg

SEQ ID NO: 925 - RNA, 19 nt, synthetic construct
  source 1..19: mol_type = other RNA
gatttcaagaaaaactgga

SEQ ID NO: 926 - RNA, 19 nt, synthetic construct
  source 1..19: mol_type = other RNA
atttcaagaaaaactggat

SEQ ID NO: 927 - RNA, 19 nt, synthetic construct
  source 1..19: mol_type = other RNA
tttcaagaaaaactggatt

SEQ ID NO: 928 - RNA, 19 nt, synthetic construct
  source 1..19: mol_type = other RNA
ttcaagaaaaactggattc

SEQ ID NO: 929 - RNA, 19 nt, synthetic construct
  source 1..19: mol_type = other RNA
tcaagaaaaactggattca

SEQ ID NO: 930 - RNA, 19 nt, synthetic construct
  source 1..19: mol_type = other RNA
caagaaaaactggattcaa

SEQ ID NO: 931 - RNA, 19 nt, synthetic construct
  source 1..19: mol_type = other RNA
aagaaaaactggattcaat

SEQ ID NO: 932 - RNA, 19 nt, synthetic construct
  source 1..19: mol_type = other RNA
agaaaaactggattcaata

SEQ ID NO: 933 - RNA, 19 nt, synthetic construct
  source 1..19: mol_type = other RNA
gaaaaactggattcaatat

SEQ ID NO: 934 - RNA, 19 nt, synthetic construct
  source 1..19: mol_type = other RNA
aaaaactggattcaatata

SEQ ID NO: 935 - RNA, 19 nt, synthetic construct
  source 1..19: mol_type = other RNA
aaaactggattcaatataa

SEQ ID NO: 936 - RNA, 19 nt, synthetic construct
  source 1..19: mol_type = other RNA
aaactggattcaatataaa

SEQ ID NO: 937 - RNA, 19 nt, synthetic construct
  source 1..19: mol_type = other RNA
aactggattcaatataaag

SEQ ID NO: 938 - RNA, 19 nt, synthetic construct
  source 1..19: mol_type = other RNA
actggattcaatataaaga

SEQ ID NO: 939 - RNA, 19 nt, synthetic construct
  source 1..19: mol_type = other RNA
ctggattcaatataaagaa

SEQ ID NO: 940 - RNA, 19 nt, synthetic construct
  source 1..19: mol_type = other RNA
tggattcaatataaagaag

SEQ ID NO: 941 - RNA, 19 nt, synthetic construct
  source 1..19: mol_type = other RNA
ggattcaatataaagaagg

SEQ ID NO: 942 - RNA, 19 nt, synthetic construct
  source 1..19: mol_type = other RNA
gattcaatataaagaagga

SEQ ID NO: 943 - RNA, 19 nt, synthetic construct
  source 1..19: mol_type = other RNA
attcaatataaagaaggat

SEQ ID NO: 944 - RNA, 19 nt, synthetic construct
  source 1..19: mol_type = other RNA
ttcaatataaagaaggatt

SEQ ID NO: 945 - RNA, 19 nt, synthetic construct
  source 1..19: mol_type = other RNA
tcaatataaagaaggattt

SEQ ID NO: 946 - RNA, 19 nt, synthetic construct
  source 1..19: mol_type = other RNA
caatataaagaaggatttg

SEQ ID NO: 947 - RNA, 19 nt, synthetic construct
  source 1..19: mol_type = other RNA
aatataaagaaggatttgg

SEQ ID NO: 948 - RNA, 19 nt, synthetic construct
  source 1..19: mol_type = other RNA
atataaagaaggatttgga

SEQ ID NO: 949 - RNA, 19 nt, synthetic construct
  source 1..19: mol_type = other RNA
tataaagaaggatttggac

SEQ ID NO: 950 - RNA, 19 nt, synthetic construct
  source 1..19: mol_type = other RNA
ataaagaaggatttggaca

SEQ ID NO: 951 - RNA, 19 nt, synthetic construct
  source 1..19: mol_type = other RNA
taaagaaggatttggacat

SEQ ID NO: 952 - RNA, 19 nt, synthetic construct
  source 1..19: mol_type = other RNA
aaagaaggatttggacatc

SEQ ID NO: 953 - RNA, 19 nt, synthetic construct
  source 1..19: mol_type = other RNA
aagaaggatttggacatct

SEQ ID NO: 954 - RNA, 19 nt, synthetic construct
  source 1..19: mol_type = other RNA
agaaggatttggacatctg

SEQ ID NO: 955 - RNA, 19 nt, synthetic construct
  source 1..19: mol_type = other RNA
gaaggatttggacatctgt

SEQ ID NO: 956 - RNA, 19 nt, synthetic construct
  source 1..19: mol_type = other RNA
aaggatttggacatctgtc

SEQ ID NO: 957 - RNA, 19 nt, synthetic construct
  source 1..19: mol_type = other RNA
aggatttggacatctgtct

SEQ ID NO: 958 - RNA, 19 nt, synthetic construct
  source 1..19: mol_type = other RNA
ggatttggacatctgtctc

SEQ ID NO: 959 - RNA, 19 nt, synthetic construct
  source 1..19: mol_type = other RNA
gatttggacatctgtctcc

SEQ ID NO: 960 - RNA, 19 nt, synthetic construct
  source 1..19: mol_type = other RNA
atttggacatctgtctcct

SEQ ID NO: 961 - RNA, 19 nt, synthetic construct
  source 1..19: mol_type = other RNA
tttggacatctgtctccta

SEQ ID NO: 962 - RNA, 19 nt, synthetic construct
  source 1..19: mol_type = other RNA
ttggacatctgtctcctac

SEQ ID NO: 963 - RNA, 19 nt, synthetic construct
  source 1..19: mol_type = other RNA
tggacatctgtctcctact

SEQ ID NO: 964 - RNA, 19 nt, synthetic construct
  source 1..19: mol_type = other RNA
ggacatctgtctcctactg

SEQ ID NO: 965 - RNA, 19 nt, synthetic construct
  source 1..19: mol_type = other RNA
gacatctgtctcctactgg

SEQ ID NO: 966 - RNA, 19 nt, synthetic construct
  source 1..19: mol_type = other RNA
acatctgtctcctactggc

SEQ ID NO: 967 - RNA, 19 nt, synthetic construct
  source 1..19: mol_type = other RNA
catctgtctcctactggca

SEQ ID NO: 968 - RNA, 19 nt, synthetic construct
  source 1..19: mol_type = other RNA
atctgtctcctactggcac

SEQ ID NO: 969 - RNA, 19 nt, synthetic construct
  source 1..19: mol_type = other RNA
tctgtctcctactggcaca

SEQ ID NO: 970 - RNA, 19 nt, synthetic construct
  source 1..19: mol_type = other RNA
ctgtctcctactggcacaa

SEQ ID NO: 971 - RNA, 19 nt, synthetic construct
  source 1..19: mol_type = other RNA
tgtctcctactggcacaac

SEQ ID NO: 972 - RNA, 19 nt, synthetic construct
  source 1..19: mol_type = other RNA
gtctcctactggcacaaca

SEQ ID NO: 973 - RNA, 19 nt, synthetic construct
  source 1..19: mol_type = other RNA
tctcctactggcacaacag

SEQ ID NO: 974 - RNA, 19 nt, synthetic construct
  source 1..19: mol_type = other RNA
ctcctactggcacaacaga

SEQ ID NO: 975 - RNA, 19 nt, synthetic construct
  source 1..19: mol_type = other RNA
tcctactggcacaacagaa

SEQ ID NO: 976 - RNA, 19 nt, synthetic construct
  source 1..19: mol_type = other RNA
cctactggcacaacagaat

SEQ ID NO: 977 - RNA, 19 nt, synthetic construct
  source 1..19: mol_type = other RNA
ctactggcacaacagaatt

SEQ ID NO: 978 - RNA, 19 nt, synthetic construct
  source 1..19: mol_type = other RNA
tactggcacaacagaattt

SEQ ID NO: 979 - RNA, 19 nt, synthetic construct
  source 1..19: mol_type = other RNA
actggcacaacagaatttt

SEQ ID NO: 980 - RNA, 19 nt, synthetic construct
  source 1..19: mol_type = other RNA
ctggcacaacagaattttg

SEQ ID NO: 981 - RNA, 19 nt, synthetic construct
  source 1..19: mol_type = other RNA
tggcacaacagaattttgg

SEQ ID NO: 982 - RNA, 19 nt, synthetic construct
  source 1..19: mol_type = other RNA
ggcacaacagaattttggc

SEQ ID NO: 983 - RNA, 19 nt, synthetic construct
  source 1..19: mol_type = other RNA
gcacaacagaattttggct

SEQ ID NO: 984 - RNA, 19 nt, synthetic construct
  source 1..19: mol_type = other RNA
cacaacagaattttggctg

SEQ ID NO: 985 - RNA, 19 nt, synthetic construct
  source 1..19: mol_type = other RNA
acaacagaattttggctgg

SEQ ID NO: 986 - RNA, 19 nt, synthetic construct
  source 1..19: mol_type = other RNA
caacagaattttggctggg

SEQ ID NO: 987 - RNA, 19 nt, synthetic construct
  source 1..19: mol_type = other RNA
aacagaattttggctggga

SEQ ID NO: 988 - RNA, 19 nt, synthetic construct
  source 1..19: mol_type = other RNA
acagaattttggctgggaa

SEQ ID NO: 989 - RNA, 19 nt, synthetic construct
  source 1..19: mol_type = other RNA
cagaattttggctgggaaa

SEQ ID NO: 990 - RNA, 19 nt, synthetic construct
  source 1..19: mol_type = other RNA
agaattttggctgggaaat

SEQ ID NO: 991 - RNA, 19 nt, synthetic construct
  source 1..19: mol_type = other RNA
gaattttggctgggaaatg

SEQ ID NO: 992 - RNA, 19 nt, synthetic construct
  source 1..19: mol_type = other RNA
aattttggctgggaaatga

SEQ ID NO: 993 - RNA, 19 nt, synthetic construct
  source 1..19: mol_type = other RNA
attttggctgggaaatgag

SEQ ID NO: 994 - RNA, 19 nt, synthetic construct
  source 1..19: mol_type = other RNA
ttttggctgggaaatgaga

SEQ ID NO: 995 - RNA, 19 nt, synthetic construct
  source 1..19: mol_type = other RNA
tttggctgggaaatgagaa

SEQ ID NO: 996 - RNA, 19 nt, synthetic construct
  source 1..19: mol_type = other RNA
ttggctgggaaatgagaag

SEQ ID NO: 997 - RNA, 19 nt, synthetic construct
  source 1..19: mol_type = other RNA
tggctgggaaatgagaaga

SEQ ID NO: 998 - RNA, 19 nt, synthetic construct
  source 1..19: mol_type = other RNA
ggctgggaaatgagaagat

SEQ ID NO: 999 - RNA, 19 nt, synthetic construct
  source 1..19: mol_type = other RNA
gctgggaaatgagaagatt

SEQ ID NO: 1000 - RNA, 19 nt, synthetic construct
  source 1..19: mol_type = other RNA
ctgggaaatgagaagattc

SEQ ID NO: 1001 - RNA, 19 nt, synthetic construct
  source 1..19: mol_type = other RNA
tgggaaatgagaagattca

SEQ ID NO: 1002 - RNA, 19 nt, synthetic construct
  source 1..19: mol_type = other RNA
gggaaatgagaagattcat

SEQ ID NO: 1003 - RNA, 19 nt, synthetic construct
  source 1..19: mol_type = other RNA
ggaaatgagaagattcatt

SEQ ID NO: 1004 - RNA, 19 nt, synthetic construct
  source 1..19: mol_type = other RNA
gaaatgagaagattcattt

SEQ ID NO: 1005 - RNA, 19 nt, synthetic construct
  source 1..19: mol_type = other RNA
aaatgagaagattcatttg

SEQ ID NO: 1006 - RNA, 19 nt, synthetic construct
  source 1..19: mol_type = other RNA
aatgagaagattcatttga

SEQ ID NO: 1007 - RNA, 19 nt, synthetic construct
  source 1..19: mol_type = other RNA
atgagaagattcatttgat

SEQ ID NO: 1008 - RNA, 19 nt, synthetic construct
  source 1..19: mol_type = other RNA
tgagaagattcatttgata

SEQ ID NO: 1009 - RNA, 19 nt, synthetic construct
  source 1..19: mol_type = other RNA
gagaagattcatttgataa

SEQ ID NO: 1010 - RNA, 19 nt, synthetic construct
  source 1..19: mol_type = other RNA
agaagattcatttgataag

SEQ ID NO: 1011 - RNA, 19 nt, synthetic construct
  source 1..19: mol_type = other RNA
gaagattcatttgataagc

SEQ ID NO: 1012 - RNA, 19 nt, synthetic construct
  source 1..19: mol_type = other RNA
aagattcatttgataagca

SEQ ID NO: 1013 - RNA, 19 nt, synthetic construct
  source 1..19: mol_type = other RNA
agattcatttgataagcac

SEQ ID NO: 1014 - RNA, 19 nt, synthetic construct
  source 1..19: mol_type = other RNA
gattcatttgataagcaca

SEQ ID NO: 1015 - RNA, 19 nt, synthetic construct
  source 1..19: mol_type = other RNA
attcatttgataagcacac

SEQ ID NO: 1016 - RNA, 19 nt, synthetic construct
  source 1..19: mol_type = other RNA
ttcatttgataagcacaca

SEQ ID NO: 1017 - RNA, 19 nt, synthetic construct
  source 1..19: mol_type = other RNA
tcatttgataagcacacag

SEQ ID NO: 1018 - RNA, 19 nt, synthetic construct
  source 1..19: mol_type = other RNA
catttgataagcacacagt

SEQ ID NO: 1019 - RNA, 19 nt, synthetic construct
  source 1..19: mol_type = other RNA
atttgataagcacacagtc

SEQ ID NO: 1020 - RNA, 19 nt, synthetic construct
  source 1..19: mol_type = other RNA
tttgataagcacacagtct

SEQ ID NO: 1021 - RNA, 19 nt, synthetic construct
  source 1..19: mol_type = other RNA
ttgataagcacacagtctg

SEQ ID NO: 1022 - RNA, 19 nt, synthetic construct
  source 1..19: mol_type = other RNA
tgataagcacacagtctgc

SEQ ID NO: 1023 - RNA, 19 nt, synthetic construct
  source 1..19: mol_type = other RNA
gataagcacacagtctgcc

SEQ ID NO: 1024 - RNA, 19 nt, synthetic construct
  source 1..19: mol_type = other RNA
ataagcacacagtctgcca

SEQ ID NO: 1025 - RNA, 19 nt, synthetic construct
  source 1..19: mol_type = other RNA
taagcacacagtctgccat

SEQ ID NO: 1026 - RNA, 19 nt, synthetic construct
  source 1..19: mol_type = other RNA
aagcacacagtctgccatc

SEQ ID NO: 1027 - RNA, 19 nt, synthetic construct
  source 1..19: mol_type = other RNA
agcacacagtctgccatcc

SEQ ID NO: 1028 - RNA, 19 nt, synthetic construct
  source 1..19: mol_type = other RNA
gcacacagtctgccatccc

SEQ ID NO: 1029 - RNA, 19 nt, synthetic construct
  source 1..19: mol_type = other RNA
cacacagtctgccatccca

SEQ ID NO: 1030 - RNA, 19 nt, synthetic construct
  source 1..19: mol_type = other RNA
acacagtctgccatcccat

SEQ ID NO: 1031 - RNA, 19 nt, synthetic construct
  source 1..19: mol_type = other RNA
cacagtctgccatcccata

SEQ ID NO: 1032 - RNA, 19 nt, synthetic construct
  source 1..19: mol_type = other RNA
acagtctgccatcccatat

SEQ ID NO: 1033 - RNA, 19 nt, synthetic construct
  source 1..19: mol_type = other RNA
cagtctgccatcccatatg

SEQ ID NO: 1034 - RNA, 19 nt, synthetic construct
  source 1..19: mol_type = other RNA
agtctgccatcccatatgc

SEQ ID NO: 1035 - RNA, 19 nt, synthetic construct
  source 1..19: mol_type = other RNA
gtctgccatcccatatgca

SEQ ID NO: 1036 - RNA, 19 nt, synthetic construct
  source 1..19: mol_type = other RNA
tctgccatcccatatgcat

SEQ ID NO: 1037 - RNA, 19 nt, synthetic construct
  source 1..19: mol_type = other RNA
ctgccatcccatatgcatt

SEQ ID NO: 1038 - RNA, 19 nt, synthetic construct
  source 1..19: mol_type = other RNA
tgccatcccatatgcatta

SEQ ID NO: 1039 - RNA, 19 nt, synthetic construct
  source 1..19: mol_type = other RNA
gccatcccatatgcattaa

SEQ ID NO: 1040 - RNA, 19 nt, synthetic construct
  source 1..19: mol_type = other RNA
ccatcccatatgcattaag

SEQ ID NO: 1041 - RNA, 19 nt, synthetic construct
  source 1..19: mol_type = other RNA
catcccatatgcattaaga

SEQ ID NO: 1042 - RNA, 19 nt, synthetic construct
  source 1..19: mol_type = other RNA
atcccatatgcattaagag

SEQ ID NO: 1043 - RNA, 19 nt, synthetic construct
  source 1..19: mol_type = other RNA
tcccatatgcattaagagt

SEQ ID NO: 1044 - RNA, 19 nt, synthetic construct
  source 1..19: mol_type = other RNA
cccatatgcattaagagtg

SEQ ID NO: 1045 - RNA, 19 nt, synthetic construct
  source 1..19: mol_type = other RNA
ccatatgcattaagagtgg

SEQ ID NO: 1046 - RNA, 19 nt, synthetic construct
  source 1..19: mol_type = other RNA
catatgcattaagagtgga

SEQ ID NO: 1047 - RNA, 19 nt, synthetic construct
  source 1..19: mol_type = other RNA
atatgcattaagagtggaa

SEQ ID NO: 1048 - RNA, 19 nt, synthetic construct
  source 1..19: mol_type = other RNA
tatgcattaagagtggaac

SEQ ID NO: 1049 - RNA, 19 nt, synthetic construct
  source 1..19: mol_type = other RNA
atgcattaagagtggaact

SEQ ID NO: 1050 - RNA, 19 nt, synthetic construct
  source 1..19: mol_type = other RNA
tgcattaagagtggaactg

SEQ ID NO: 1051 - RNA, 19 nt, synthetic construct
  source 1..19: mol_type = other RNA
gcattaagagtggaactgg

SEQ ID NO: 1052 - RNA, 19 nt, synthetic construct
  source 1..19: mol_type = other RNA
cattaagagtggaactgga

SEQ ID NO: 1053 - RNA, 19 nt, synthetic construct
  source 1..19: mol_type = other RNA
attaagagtggaactggaa

SEQ ID NO: 1054 - RNA, 19 nt, synthetic construct
  source 1..19: mol_type = other RNA
ttaagagtggaactggaag

SEQ ID NO: 1055 - RNA, 19 nt, synthetic construct
  source 1..19: mol_type = other RNA
taagagtggaactggaaga

SEQ ID NO: 1056 - RNA, 19 nt, synthetic construct
  source 1..19: mol_type = other RNA
aagagtggaactggaagac

SEQ ID NO: 1057 - RNA, 19 nt, synthetic construct
  source 1..19: mol_type = other RNA
agagtggaactggaagact

SEQ ID NO: 1058 - RNA, 19 nt, synthetic construct
  source 1..19: mol_type = other RNA
gagtggaactggaagactg

SEQ ID NO: 1059 - RNA, 19 nt, synthetic construct
  source 1..19: mol_type = other RNA
agtggaactggaagactgg

SEQ ID NO: 1060 - RNA, 19 nt, synthetic construct
  source 1..19: mol_type = other RNA
gtggaactggaagactgga

SEQ ID NO: 1061 - RNA, 19 nt, synthetic construct
  source 1..19: mol_type = other RNA
tggaactggaagactggaa

SEQ ID NO: 1062 - RNA, 19 nt, synthetic construct
  source 1..19: mol_type = other RNA
ggaactggaagactggaat

SEQ ID NO: 1063 - RNA, 19 nt, synthetic construct
  source 1..19: mol_type = other RNA
gaactggaagactggaatg

SEQ ID NO: 1064 - RNA, 19 nt, synthetic construct
  source 1..19: mol_type = other RNA
aactggaagactggaatgg

SEQ ID NO: 1065 - RNA, 19 nt, synthetic construct
  source 1..19: mol_type = other RNA
actggaagactggaatggc

SEQ ID NO: 1066 - RNA, 19 nt, synthetic construct
  source 1..19: mol_type = other RNA
ctggaagactggaatggca

SEQ ID NO: 1067 - RNA, 19 nt, synthetic construct
  source 1..19: mol_type = other RNA
tggaagactggaatggcag

SEQ ID NO: 1068 - RNA, 19 nt, synthetic construct
  source 1..19: mol_type = other RNA
ggaagactggaatggcaga

SEQ ID NO: 1069 - RNA, 19 nt, synthetic construct
  source 1..19: mol_type = other RNA
gaagactggaatggcagaa

SEQ ID NO: 1070 - RNA, 19 nt, synthetic construct
  source 1..19: mol_type = other RNA
aagactggaatggcagaac

SEQ ID NO: 1071 - RNA, 19 nt, synthetic construct
  source 1..19: mol_type = other RNA
agactggaatggcagaacc

SEQ ID NO: 1072 - RNA, 19 nt, synthetic construct
  source 1..19: mol_type = other RNA
gactggaatggcagaacca

SEQ ID NO: 1073 - RNA, 19 nt, synthetic construct
  source 1..19: mol_type = other RNA
actggaatggcagaaccag

SEQ ID NO: 1074 - RNA, 19 nt, synthetic construct
  source 1..19: mol_type = other RNA
ctggaatggcagaaccagt

SEQ ID NO: 1075 - RNA, 19 nt, synthetic construct
  source 1..19: mol_type = other RNA
tggaatggcagaaccagta

SEQ ID NO: 1076 - RNA, 19 nt, synthetic construct
  source 1..19: mol_type = other RNA
ggaatggcagaaccagtac

SEQ ID NO: 1077 - RNA, 19 nt, synthetic construct
  source 1..19: mol_type = other RNA
gaatggcagaaccagtact

SEQ ID NO: 1078 - RNA, 19 nt, synthetic construct
  source 1..19: mol_type = other RNA
aatggcagaaccagtactg

SEQ ID NO: 1079 - RNA, 19 nt, synthetic construct
  source 1..19: mol_type = other RNA
atggcagaaccagtactgc

SEQ ID NO: 1080 - RNA, 19 nt, synthetic construct
  source 1..19: mol_type = other RNA
tggcagaaccagtactgca

SEQ ID NO: 1081 - RNA, 19 nt, synthetic construct
  source 1..19: mol_type = other RNA
ggcagaaccagtactgcag

SEQ ID NO: 1082 - RNA, 19 nt, synthetic construct
  source 1..19: mol_type = other RNA
gcagaaccagtactgcaga

SEQ ID NO: 1083 - RNA, 19 nt, synthetic construct
  source 1..19: mol_type = other RNA
cagaaccagtactgcagac

SEQ ID NO: 1084 - RNA, 19 nt, synthetic construct
  source 1..19: mol_type = other RNA
agaaccagtactgcagact

SEQ ID NO: 1085 - RNA, 19 nt, synthetic construct
  source 1..19: mol_type = other RNA
gaaccagtactgcagacta

SEQ ID NO: 1086 - RNA, 19 nt, synthetic construct
  source 1..19: mol_type = other RNA
aaccagtactgcagactat

SEQ ID NO: 1087 - RNA, 19 nt, synthetic construct
  source 1..19: mol_type = other RNA
accagtactgcagactatg

SEQ ID NO: 1088 - RNA, 19 nt, synthetic construct
  source 1..19: mol_type = other RNA
ccagtactgcagactatgc

SEQ ID NO: 1089 - RNA, 19 nt, synthetic construct
  source 1..19: mol_type = other RNA
cagtactgcagactatgcc

SEQ ID NO: 1090 - RNA, 19 nt, synthetic construct
  source 1..19: mol_type = other RNA
agtactgcagactatgcca

SEQ ID NO: 1091 - RNA, 19 nt, synthetic construct
  source 1..19: mol_type = other RNA
gtactgcagactatgccat

SEQ ID NO: 1092 - RNA, 19 nt, synthetic construct
  source 1..19: mol_type = other RNA
tactgcagactatgccatg

SEQ ID NO: 1093 - RNA, 19 nt, synthetic construct
  source 1..19: mol_type = other RNA
actgcagactatgccatgt

SEQ ID NO: 1094 - RNA, 19 nt, synthetic construct
  source 1..19: mol_type = other RNA
ctgcagactatgccatgtt

SEQ ID NO: 1095 - RNA, 19 nt, synthetic construct
  source 1..19: mol_type = other RNA
tgcagactatgccatgttc

SEQ ID NO: 1096 - RNA, 19 nt, synthetic construct
  source 1..19: mol_type = other RNA
gcagactatgccatgttca

SEQ ID NO: 1097 - RNA, 19 nt, synthetic construct
  source 1..19: mol_type = other RNA
cagactatgccatgttcaa

SEQ ID NO: 1098 - RNA, 19 nt, synthetic construct
  source 1..19: mol_type = other RNA
agactatgccatgttcaag

SEQ ID NO: 1099 - RNA, 19 nt, synthetic construct
  source 1..19: mol_type = other RNA
gactatgccatgttcaagg

SEQ ID NO: 1100 - RNA, 19 nt, synthetic construct
  source 1..19: mol_type = other RNA
actatgccatgttcaaggt

SEQ ID NO: 1101 - RNA, 19 nt, synthetic construct
  source 1..19: mol_type = other RNA
ctatgccatgttcaaggtg

SEQ ID NO: 1102 - RNA, 19 nt, synthetic construct
  source 1..19: mol_type = other RNA
tatgccatgttcaaggtgg

SEQ ID NO: 1103 - RNA, 19 nt, synthetic construct
  source 1..19: mol_type = other RNA
atgccatgttcaaggtggg

SEQ ID NO: 1104 - RNA, 19 nt, synthetic construct
  source 1..19: mol_type = other RNA
tgccatgttcaaggtggga

SEQ ID NO: 1105 - RNA, 19 nt, synthetic construct
  source 1..19: mol_type = other RNA
gccatgttcaaggtgggac

SEQ ID NO: 1106 - RNA, 19 nt, synthetic construct
  source 1..19: mol_type = other RNA
ccatgttcaaggtgggacc

SEQ ID NO: 1107 - RNA, 19 nt, synthetic construct
  source 1..19: mol_type = other RNA
catgttcaaggtgggacct

SEQ ID NO: 1108 - RNA, 19 nt, synthetic construct
  source 1..19: mol_type = other RNA
atgttcaaggtgggacctg

SEQ ID NO: 1109 - RNA, 19 nt, synthetic construct
  source 1..19: mol_type = other RNA
tgttcaaggtgggacctga

SEQ ID NO: 1110 - RNA, 19 nt, synthetic construct
  source 1..19: mol_type = other RNA
gttcaaggtgggacctgaa

SEQ ID NO: 1111 - RNA, 19 nt, synthetic construct
  source 1..19: mol_type = other RNA
ttcaaggtgggacctgaag

SEQ ID NO: 1112 - RNA, 19 nt, synthetic construct
  source 1..19: mol_type = other RNA
tcaaggtgggacctgaagc

SEQ ID NO: 1113 - RNA, 19 nt, synthetic construct
  source 1..19: mol_type = other RNA
caaggtgggacctgaagct

SEQ ID NO: 1114 - RNA, 19 nt, synthetic construct
  source 1..19: mol_type = other RNA
aaggtgggacctgaagctg

SEQ ID NO: 1115 - RNA, 19 nt, synthetic construct
  source 1..19: mol_type = other RNA
aggtgggacctgaagctga

SEQ ID NO: 1116 - RNA, 19 nt, synthetic construct
  source 1..19: mol_type = other RNA
ggtgggacctgaagctgac

SEQ ID NO: 1117 - RNA, 19 nt, synthetic construct
  source 1..19: mol_type = other RNA
gtgggacctgaagctgaca

SEQ ID NO: 1118 - RNA, 19 nt, synthetic construct
  source 1..19: mol_type = other RNA
tgggacctgaagctgacaa

SEQ ID NO: 1119 - RNA, 19 nt, synthetic construct
  source 1..19: mol_type = other RNA
gggacctgaagctgacaag

SEQ ID NO: 1120 - RNA, 19 nt, synthetic construct
  source 1..19: mol_type = other RNA
ggacctgaagctgacaagt

SEQ ID NO: 1121 - RNA, 19 nt, synthetic construct
  source 1..19: mol_type = other RNA
gacctgaagctgacaagta

SEQ ID NO: 1122 - RNA, 19 nt, synthetic construct
  source 1..19: mol_type = other RNA
acctgaagctgacaagtac

SEQ ID NO: 1123 - RNA, 19 nt, synthetic construct
  source 1..19: mol_type = other RNA
cctgaagctgacaagtacc

SEQ ID NO: 1124 - RNA, 19 nt, synthetic construct
  source 1..19: mol_type = other RNA
ctgaagctgacaagtaccg

SEQ ID NO: 1125 - RNA, 19 nt, synthetic construct
  source 1..19: mol_type = other RNA
tgaagctgacaagtaccgc

SEQ ID NO: 1126 - RNA, 19 nt, synthetic construct
  source 1..19: mol_type = other RNA
gaagctgacaagtaccgcc

SEQ ID NO: 1127 - RNA, 19 nt, synthetic construct
  source 1..19: mol_type = other RNA
aagctgacaagtaccgcct

SEQ ID NO: 1128 - RNA, 19 nt, synthetic construct
  source 1..19: mol_type = other RNA
agctgacaagtaccgccta

SEQ ID NO: 1129 - RNA, 19 nt, synthetic construct
  source 1..19: mol_type = other RNA
gctgacaagtaccgcctaa

SEQ ID NO: 1130 - RNA, 19 nt, synthetic construct
  source 1..19: mol_type = other RNA
ctgacaagtaccgcctaac

SEQ ID NO: 1131 - RNA, 19 nt, synthetic construct
  source 1..19: mol_type = other RNA
tgacaagtaccgcctaaca

SEQ ID NO: 1132 - RNA, 19 nt, synthetic construct
  source 1..19: mol_type = other RNA
gacaagtaccgcctaacat

SEQ ID NO: 1133 - RNA, 19 nt, synthetic construct
  source 1..19: mol_type = other RNA
acaagtaccgcctaacata

SEQ ID NO: 1134 - RNA, 19 nt, synthetic construct
  source 1..19: mol_type = other RNA
caagtaccgcctaacatat

SEQ ID NO: 1135 - RNA, 19 nt, synthetic construct
  source 1..19: mol_type = other RNA
aagtaccgcctaacatatg

SEQ ID NO: 1136 - RNA, 19 nt, synthetic construct
  source 1..19: mol_type = other RNA
agtaccgcctaacatatgc

SEQ ID NO: 1137 - RNA, 19 nt, synthetic construct
  source 1..19: mol_type = other RNA
gtaccgcctaacatatgcc

SEQ ID NO: 1138 - RNA, 19 nt, synthetic construct
  source 1..19: mol_type = other RNA
taccgcctaacatatgcct

SEQ ID NO: 1139 - RNA, 19 nt, synthetic construct
  source 1..19: mol_type = other RNA
accgcctaacatatgccta

SEQ ID NO: 1140 - RNA, 19 nt, synthetic construct
  source 1..19: mol_type = other RNA
ccgcctaacatatgcctac

SEQ ID NO: 1141 - RNA, 19 nt, synthetic construct
  source 1..19: mol_type = other RNA
cgcctaacatatgcctact

SEQ ID NO: 1142 - RNA, 19 nt, synthetic construct
  source 1..19: mol_type = other RNA
gcctaacatatgcctactt

SEQ ID NO: 1143 - RNA, 19 nt, synthetic construct
  source 1..19: mol_type = other RNA
cctaacatatgcctacttc

SEQ ID NO: 1144 - RNA, 19 nt, synthetic construct
  source 1..19: mol_type = other RNA
ctaacatatgcctacttcg

SEQ ID NO: 1145 - RNA, 19 nt, synthetic construct
  source 1..19: mol_type = other RNA
taacatatgcctacttcgc

SEQ ID NO: 1146 - RNA, 19 nt, synthetic construct
  source 1..19: mol_type = other RNA
aacatatgcctacttcgct

SEQ ID NO: 1147 - RNA, 19 nt, synthetic construct
  source 1..19: mol_type = other RNA
acatatgcctacttcgctg

SEQ ID NO: 1148 - RNA, 19 nt, synthetic construct
  source 1..19: mol_type = other RNA
catatgcctacttcgctgg

SEQ ID NO: 1149 - RNA, 19 nt, synthetic construct
  source 1..19: mol_type = other RNA
atatgcctacttcgctggt

SEQ ID NO: 1150 - RNA, 19 nt, synthetic construct
  source 1..19: mol_type = other RNA
tatgcctacttcgctggtg

SEQ ID NO: 1151 - RNA, 19 nt, synthetic construct
  source 1..19: mol_type = other RNA
atgcctacttcgctggtgg

SEQ ID NO: 1152 - RNA, 19 nt, synthetic construct
  source 1..19: mol_type = other RNA
tgcctacttcgctggtggg

SEQ ID NO: 1153 - RNA, 19 nt, synthetic construct
  source 1..19: mol_type = other RNA
gcctacttcgctggtgggg

SEQ ID NO: 1154 - RNA, 19 nt, synthetic construct
  source 1..19: mol_type = other RNA
cctacttcgctggtgggga

SEQ ID NO: 1155 - RNA, 19 nt, synthetic construct
  source 1..19: mol_type = other RNA
ctacttcgctggtggggat

SEQ ID NO: 1156 - RNA, 19 nt, synthetic construct
  source 1..19: mol_type = other RNA
tacttcgctggtggggatg

SEQ ID NO: 1157 - RNA, 19 nt, synthetic construct
  source 1..19: mol_type = other RNA
acttcgctggtggggatgc

SEQ ID NO: 1158 - RNA, 19 nt, synthetic construct
  source 1..19: mol_type = other RNA
cttcgctggtggggatgct

SEQ ID NO: 1159 - RNA, 19 nt, synthetic construct
  source 1..19: mol_type = other RNA
ttcgctggtggggatgctg

SEQ ID NO: 1160 - RNA, 19 nt, synthetic construct
  source 1..19: mol_type = other RNA
tcgctggtggggatgctgg

SEQ ID NO: 1161 - RNA, 19 nt, synthetic construct
  source 1..19: mol_type = other RNA
cgctggtggggatgctgga

SEQ ID NO: 1162 - RNA, 19 nt, synthetic construct
  source 1..19: mol_type = other RNA
gctggtggggatgctggag

SEQ ID NO: 1163 - RNA, 19 nt, synthetic construct
  source 1..19: mol_type = other RNA
ctggtggggatgctggaga

SEQ ID NO: 1164 - RNA, 19 nt, synthetic construct
  source 1..19: mol_type = other RNA
tggtggggatgctggagat

SEQ ID NO: 1165 - RNA, 19 nt, synthetic construct
  source 1..19: mol_type = other RNA
ggtggggatgctggagatg

SEQ ID NO: 1166 - RNA, 19 nt, synthetic construct
  source 1..19: mol_type = other RNA
gtggggatgctggagatgc

SEQ ID NO: 1167 - RNA, 19 nt, synthetic construct
  source 1..19: mol_type = other RNA
tggggatgctggagatgcc

SEQ ID NO: 1168 - RNA, 19 nt, synthetic construct
  source 1..19: mol_type = other RNA
ggggatgctggagatgcct

SEQ ID NO: 1169 - RNA, 19 nt, synthetic construct
  source 1..19: mol_type = other RNA
gggatgctggagatgcctt

SEQ ID NO: 1170 - RNA, 19 nt, synthetic construct
  source 1..19: mol_type = other RNA
ggatgctggagatgccttt

SEQ ID NO: 1171 - RNA, 19 nt, synthetic construct
  source 1..19: mol_type = other RNA
gatgctggagatgcctttg

SEQ ID NO: 1172 - RNA, 19 nt, synthetic construct
  source 1..19: mol_type = other RNA
atgctggagatgcctttga

SEQ ID NO: 1173 - RNA, 19 nt, synthetic construct
  source 1..19: mol_type = other RNA
tgctggagatgcctttgat

SEQ ID NO: 1174 - RNA, 19 nt, synthetic construct
  source 1..19: mol_type = other RNA
gctggagatgcctttgatg

SEQ ID NO: 1175 - RNA, 19 nt, synthetic construct
  source 1..19: mol_type = other RNA
ctggagatgcctttgatgg

SEQ ID NO: 1176 - RNA, 19 nt, synthetic construct
  source 1..19: mol_type = other RNA
tggagatgcctttgatggc

SEQ ID NO: 1177 - RNA, 19 nt, synthetic construct
  source 1..19: mol_type = other RNA
ggagatgcctttgatggct

SEQ ID NO: 1178 - RNA, 19 nt, synthetic construct
  source 1..19: mol_type = other RNA
gagatgcctttgatggctt

SEQ ID NO: 1179 - RNA, 19 nt, synthetic construct
  source 1..19: mol_type = other RNA
agatgcctttgatggcttt

SEQ ID NO: 1180 - RNA, 19 nt, synthetic construct
  source 1..19: mol_type = other RNA
gatgcctttgatggctttg

SEQ ID NO: 1181 - RNA, 19 nt, synthetic construct
  source 1..19: mol_type = other RNA
atgcctttgatggctttga

SEQ ID NO: 1182 - RNA, 19 nt, synthetic construct
  source 1..19: mol_type = other RNA
tgcctttgatggctttgat

SEQ ID NO: 1183 - RNA, 19 nt, synthetic construct
  source 1..19: mol_type = other RNA
gcctttgatggctttgatt

SEQ ID NO: 1184 - RNA, 19 nt, synthetic construct
  source 1..19: mol_type = other RNA
cctttgatggctttgattt

SEQ ID NO: 1185 - RNA, 19 nt, synthetic construct
  source 1..19: mol_type = other RNA
ctttgatggctttgatttt

SEQ ID NO: 1186 - RNA, 19 nt, synthetic construct
  source 1..19: mol_type = other RNA
tttgatggctttgattttg

SEQ ID NO: 1187 - RNA, 19 nt, synthetic construct
  source 1..19: mol_type = other RNA
ttgatggctttgattttgg

SEQ ID NO: 1188 - RNA, 19 nt, synthetic construct
  source 1..19: mol_type = other RNA
tgatggctttgattttggc

SEQ ID NO: 1189 - RNA, 19 nt, synthetic construct
  source 1..19: mol_type = other RNA
gatggctttgattttggcg

SEQ ID NO: 1190 - RNA, 19 nt, synthetic construct
  source 1..19: mol_type = other RNA
atggctttgattttggcga

SEQ ID NO: 1191 - RNA, 19 nt, synthetic construct
  source 1..19: mol_type = other RNA
tggctttgattttggcgat

SEQ ID NO: 1192 - RNA, 19 nt, synthetic construct
  source 1..19: mol_type = other RNA
ggctttgattttggcgatg

SEQ ID NO: 1193 - RNA, 19 nt, synthetic construct
  source 1..19: mol_type = other RNA
gctttgattttggcgatga

SEQ ID NO: 1194 - RNA, 19 nt, synthetic construct
  source 1..19: mol_type = other RNA
ctttgattttggcgatgat

SEQ ID NO: 1195 - RNA, 19 nt, synthetic construct
  source 1..19: mol_type = other RNA
tttgattttggcgatgatc

SEQ ID NO: 1196 - RNA, 19 nt, synthetic construct
  source 1..19: mol_type = other RNA
ttgattttggcgatgatcc

SEQ ID NO: 1197 - RNA, 19 nt, synthetic construct
  source 1..19: mol_type = other RNA
tgattttggcgatgatcct

SEQ ID NO: 1198 - RNA, 19 nt, synthetic construct
  source 1..19: mol_type = other RNA
gattttggcgatgatccta

SEQ ID NO: 1199 - RNA, 19 nt, synthetic construct
  source 1..19: mol_type = other RNA
attttggcgatgatcctag

SEQ ID NO: 1200 - RNA, 19 nt, synthetic construct
  source 1..19: mol_type = other RNA
ttttggcgatgatcctagt

SEQ ID NO: 1201 - RNA, 19 nt, synthetic construct
  source 1..19: mol_type = other RNA
tttggcgatgatcctagtg

SEQ ID NO: 1202 - RNA, 19 nt, synthetic construct
  source 1..19: mol_type = other RNA
ttggcgatgatcctagtga

SEQ ID NO: 1203 - RNA, 19 nt, synthetic construct
  source 1..19: mol_type = other RNA
tggcgatgatcctagtgac

SEQ ID NO: 1204 - RNA, 19 nt, synthetic construct
  source 1..19: mol_type = other RNA
ggcgatgatcctagtgaca

SEQ ID NO: 1205 - RNA, 19 nt, synthetic construct
  source 1..19: mol_type = other RNA
gcgatgatcctagtgacaa

SEQ ID NO: 1206 - RNA, 19 nt, synthetic construct
  source 1..19: mol_type = other RNA
cgatgatcctagtgacaag

SEQ ID NO: 1207 - RNA, 19 nt, synthetic construct
  source 1..19: mol_type = other RNA
gatgatcctagtgacaagt

SEQ ID NO: 1208 - RNA, 19 nt, synthetic construct
  source 1..19: mol_type = other RNA
atgatcctagtgacaagtt

SEQ ID NO: 1209 - RNA, 19 nt, synthetic construct
  source 1..19: mol_type = other RNA
tgatcctagtgacaagttt

SEQ ID NO: 1210 - RNA, 19 nt, synthetic construct
  source 1..19: mol_type = other RNA
gatcctagtgacaagtttt

SEQ ID NO: 1211 - RNA, 19 nt, synthetic construct
  source 1..19: mol_type = other RNA
atcctagtgacaagttttt

SEQ ID NO: 1212 - RNA, 19 nt, synthetic construct
  source 1..19: mol_type = other RNA
tcctagtgacaagtttttc

SEQ ID NO: 1213 - RNA, 19 nt, synthetic construct
  source 1..19: mol_type = other RNA
cctagtgacaagtttttca

SEQ ID NO: 1214 - RNA, 19 nt, synthetic construct
  source 1..19: mol_type = other RNA
ctagtgacaagtttttcac

SEQ ID NO: 1215 - RNA, 19 nt, synthetic construct
  source 1..19: mol_type = other RNA
tagtgacaagtttttcaca

SEQ ID NO: 1216 - RNA, 19 nt, synthetic construct
  source 1..19: mol_type = other RNA
agtgacaagtttttcacat

SEQ ID NO: 1217 - RNA, 19 nt, synthetic construct
  source 1..19: mol_type = other RNA
gtgacaagtttttcacatc

SEQ ID NO: 1218 - RNA, 19 nt, synthetic construct
  source 1..19: mol_type = other RNA
tgacaagtttttcacatcc

SEQ ID NO: 1219 - RNA, 19 nt, synthetic construct
  source 1..19: mol_type = other RNA
gacaagtttttcacatccc

SEQ ID NO: 1220 - RNA, 19 nt, synthetic construct
  source 1..19: mol_type = other RNA
acaagtttttcacatccca

SEQ ID NO: 1221 - RNA, 19 nt, synthetic construct
  source 1..19: mol_type = other RNA
caagtttttcacatcccat

SEQ ID NO: 1222 - RNA, 19 nt, synthetic construct
  source 1..19: mol_type = other RNA
aagtttttcacatcccata

SEQ ID NO: 1223 - RNA, 19 nt, synthetic construct
  source 1..19: mol_type = other RNA
agtttttcacatcccataa

SEQ ID NO: 1224 - RNA, 19 nt, synthetic construct
  source 1..19: mol_type = other RNA
gtttttcacatcccataat

SEQ ID NO: 1225 - RNA, 19 nt, synthetic construct
  source 1..19: mol_type = other RNA
tttttcacatcccataatg

SEQ ID NO: 1226 - RNA, 19 nt, synthetic construct
  source 1..19: mol_type = other RNA
ttttcacatcccataatgg

SEQ ID NO: 1227 - RNA, 19 nt, synthetic construct
  source 1..19: mol_type = other RNA
tttcacatcccataatggc

SEQ ID NO: 1228 - RNA, 19 nt, synthetic construct
  source 1..19: mol_type = other RNA
ttcacatcccataatggca

SEQ ID NO: 1229 - RNA, 19 nt, synthetic construct
  source 1..19: mol_type = other RNA
tcacatcccataatggcat

SEQ ID NO: 1230 - RNA, 19 nt, synthetic construct
  source 1..19: mol_type = other RNA
cacatcccataatggcatg

SEQ ID NO: 1231 - RNA, 19 nt, synthetic construct
  source 1..19: mol_type = other RNA
acatcccataatggcatgc

SEQ ID NO: 1232 - RNA, 19 nt, synthetic construct
  source 1..19: mol_type = other RNA
catcccataatggcatgca

SEQ ID NO: 1233 - RNA, 19 nt, synthetic construct
  source 1..19: mol_type = other RNA
atcccataatggcatgcag

SEQ ID NO: 1234 - RNA, 19 nt, synthetic construct
  source 1..19: mol_type = other RNA
tcccataatggcatgcagt

SEQ ID NO: 1235 - RNA, 19 nt, synthetic construct
  source 1..19: mol_type = other RNA
cccataatggcatgcagtt

SEQ ID NO: 1236 - RNA, 19 nt, synthetic construct
  source 1..19: mol_type = other RNA
ccataatggcatgcagttc

SEQ ID NO: 1237 - RNA, 19 nt, synthetic construct
  source 1..19: mol_type = other RNA
cataatggcatgcagttca

SEQ ID NO: 1238 - RNA, 19 nt, synthetic construct
  source 1..19: mol_type = other RNA
ataatggcatgcagttcag

SEQ ID NO: 1239 - RNA, 19 nt, synthetic construct
  source 1..19: mol_type = other RNA
taatggcatgcagttcagt

SEQ ID NO: 1240 - RNA, 19 nt, synthetic construct
  source 1..19: mol_type = other RNA
aatggcatgcagttcagta

SEQ ID NO: 1241 - RNA, 19 nt, synthetic construct
  source 1..19: mol_type = other RNA
atggcatgcagttcagtac

SEQ ID NO: 1242 - RNA, 19 nt, synthetic construct
  source 1..19: mol_type = other RNA
tggcatgcagttcagtacc

SEQ ID NO: 1243 - RNA, 19 nt, synthetic construct
  source 1..19: mol_type = other RNA
ggcatgcagttcagtacct

SEQ ID NO: 1244 - RNA, 19 nt, synthetic construct
  source 1..19: mol_type = other RNA
gcatgcagttcagtacctg

SEQ ID NO: 1245 - RNA, 19 nt, synthetic construct
  source 1..19: mol_type = other RNA
catgcagttcagtacctgg

SEQ ID NO: 1246 - RNA, 19 nt, synthetic construct
  source 1..19: mol_type = other RNA
atgcagttcagtacctggg

SEQ ID NO: 1247 - RNA, 19 nt, synthetic construct
  source 1..19: mol_type = other RNA
tgcagttcagtacctggga

SEQ ID NO: 1248 - RNA, 19 nt, synthetic construct
  source 1..19: mol_type = other RNA
gcagttcagtacctgggac

SEQ ID NO: 1249 - RNA, 19 nt, synthetic construct
  source 1..19: mol_type = other RNA
cagttcagtacctgggaca

SEQ ID NO: 1250 - RNA, 19 nt, synthetic construct
  source 1..19: mol_type = other RNA
agttcagtacctgggacaa

SEQ ID NO: 1251 - RNA, 19 nt, synthetic construct
  source 1..19: mol_type = other RNA
gttcagtacctgggacaat

SEQ ID NO: 1252 - RNA, 19 nt, synthetic construct
  source 1..19: mol_type = other RNA
ttcagtacctgggacaatg

SEQ ID NO: 1253 - RNA, 19 nt, synthetic construct
  source 1..19: mol_type = other RNA
tcagtacctgggacaatga

SEQ ID NO: 1254 - RNA, 19 nt, synthetic construct
  source 1..19: mol_type = other RNA
cagtacctgggacaatgac

SEQ ID NO: 1255 - RNA, 19 nt, synthetic construct
  source 1..19: mol_type = other RNA
agtacctgggacaatgaca

SEQ ID NO: 1256 - RNA, 19 nt, synthetic construct
  source 1..19: mol_type = other RNA
gtacctgggacaatgacaa

SEQ ID NO: 1257 - RNA, 19 nt, synthetic construct
  source 1..19: mol_type = other RNA
tacctgggacaatgacaat

SEQ ID NO: 1258 - RNA, 19 nt, synthetic construct
  source 1..19: mol_type = other RNA
acctgggacaatgacaatg

SEQ ID NO: 1259 - RNA, 19 nt, synthetic construct
  source 1..19: mol_type = other RNA
cctgggacaatgacaatga

SEQ ID NO: 1260 - RNA, 19 nt, synthetic construct
  source 1..19: mol_type = other RNA
ctgggacaatgacaatgat

SEQ ID NO: 1261 - RNA, 19 nt, synthetic construct
  source 1..19: mol_type = other RNA
tgggacaatgacaatgata

SEQ ID NO: 1262 - RNA, 19 nt, synthetic construct
  source 1..19: mol_type = other RNA
gggacaatgacaatgataa

SEQ ID NO: 1263 - RNA, 19 nt, synthetic construct
  source 1..19: mol_type = other RNA
ggacaatgacaatgataag

SEQ ID NO: 1264 - RNA, 19 nt, synthetic construct
  source 1..19: mol_type = other RNA
gacaatgacaatgataagt

SEQ ID NO: 1265 - RNA, 19 nt, synthetic construct
  source 1..19: mol_type = other RNA
acaatgacaatgataagtt

SEQ ID NO: 1266 - RNA, 19 nt, synthetic construct
  source 1..19: mol_type = other RNA
caatgacaatgataagttt

SEQ ID NO: 1267 - RNA, 19 nt, synthetic construct
  source 1..19: mol_type = other RNA
aatgacaatgataagtttg

SEQ ID NO: 1268 - RNA, 19 nt, synthetic construct
  source 1..19: mol_type = other RNA
atgacaatgataagtttga

SEQ ID NO: 1269 - RNA, 19 nt, synthetic construct
  source 1..19: mol_type = other RNA
tgacaatgataagtttgaa

SEQ ID NO: 1270 - RNA, 19 nt, synthetic construct
  source 1..19: mol_type = other RNA
gacaatgataagtttgaag

SEQ ID NO: 1271 - RNA, 19 nt, synthetic construct
  source 1..19: mol_type = other RNA
acaatgataagtttgaagg

SEQ ID NO: 1272 - RNA, 19 nt, synthetic construct
  source 1..19: mol_type = other RNA
caatgataagtttgaaggc

SEQ ID NO: 1273 - RNA, 19 nt, synthetic construct
  source 1..19: mol_type = other RNA
aatgataagtttgaaggca

SEQ ID NO: 1274 - RNA, 19 nt, synthetic construct
  source 1..19: mol_type = other RNA
atgataagtttgaaggcaa

SEQ ID NO: 1275 - RNA, 19 nt, synthetic construct
  source 1..19: mol_type = other RNA
tgataagtttgaaggcaac

SEQ ID NO: 1276 - RNA, 19 nt, synthetic construct
  source 1..19: mol_type = other RNA
gataagtttgaaggcaact

SEQ ID NO: 1277 - RNA, 19 nt, synthetic construct
  source 1..19: mol_type = other RNA
ataagtttgaaggcaactg

SEQ ID NO: 1278 - RNA, 19 nt, synthetic construct
  source 1..19: mol_type = other RNA
taagtttgaaggcaactgt

SEQ ID NO: 1279 - RNA, 19 nt, synthetic construct
  source 1..19: mol_type = other RNA
aagtttgaaggcaactgtg

SEQ ID NO: 1280 - RNA, 19 nt, synthetic construct
  source 1..19: mol_type = other RNA
agtttgaaggcaactgtgc

SEQ ID NO: 1281 - RNA, 19 nt, synthetic construct
  source 1..19: mol_type = other RNA
gtttgaaggcaactgtgct

SEQ ID NO: 1282 - RNA, 19 nt, synthetic construct
  source 1..19: mol_type = other RNA
tttgaaggcaactgtgctg

SEQ ID NO: 1283 - RNA, 19 nt, synthetic construct
  source 1..19: mol_type = other RNA
ttgaaggcaactgtgctga

SEQ ID NO: 1284 - RNA, 19 nt, synthetic construct
  source 1..19: mol_type = other RNA
tgaaggcaactgtgctgaa

SEQ ID NO: 1285 - RNA, 19 nt, synthetic construct
  source 1..19: mol_type = other RNA
gaaggcaactgtgctgaac

SEQ ID NO: 1286 - RNA, 19 nt, synthetic construct
  source 1..19: mol_type = other RNA
aaggcaactgtgctgaaca

SEQ ID NO: 1287 - RNA, 19 nt, synthetic construct
  source 1..19: mol_type = other RNA
aggcaactgtgctgaacag

SEQ ID NO: 1288 - RNA, 19 nt, synthetic construct
  source 1..19: mol_type = other RNA
ggcaactgtgctgaacagg

SEQ ID NO: 1289 - RNA, 19 nt, synthetic construct
  source 1..19: mol_type = other RNA
gcaactgtgctgaacagga

SEQ ID NO: 1290 - RNA, 19 nt, synthetic construct
  source 1..19: mol_type = other RNA
caactgtgctgaacaggat

SEQ ID NO: 1291 - RNA, 19 nt, synthetic construct
  source 1..19: mol_type = other RNA
aactgtgctgaacaggatg

SEQ ID NO: 1292 - RNA, 19 nt, synthetic construct
  source 1..19: mol_type = other RNA
actgtgctgaacaggatgg

SEQ ID NO: 1293 - RNA, 19 nt, synthetic construct
  source 1..19: mol_type = other RNA
ctgtgctgaacaggatgga

SEQ ID NO: 1294 - RNA, 19 nt, synthetic construct
  source 1..19: mol_type = other RNA
tgtgctgaacaggatggat

SEQ ID NO: 1295 - RNA, 19 nt, synthetic construct
  source 1..19: mol_type = other RNA
gtgctgaacaggatggatc

SEQ ID NO: 1296 - RNA, 19 nt, synthetic construct
  source 1..19: mol_type = other RNA
tgctgaacaggatggatct

SEQ ID NO: 1297 - RNA, 19 nt, synthetic construct
  source 1..19: mol_type = other RNA
gctgaacaggatggatctg

SEQ ID NO: 1298 - RNA, 19 nt, synthetic construct
  source 1..19: mol_type = other RNA
ctgaacaggatggatctgg

SEQ ID NO: 1299 - RNA, 19 nt, synthetic construct
  source 1..19: mol_type = other RNA
tgaacaggatggatctggt

SEQ ID NO: 1300 - RNA, 19 nt, synthetic construct
  source 1..19: mol_type = other RNA
gaacaggatggatctggtt

SEQ ID NO: 1301 - RNA, 19 nt, synthetic construct
  source 1..19: mol_type = other RNA
aacaggatggatctggttg

SEQ ID NO: 1302 - RNA, 19 nt, synthetic construct
  source 1..19: mol_type = other RNA
acaggatggatctggttgg

SEQ ID NO: 1303 - RNA, 19 nt, synthetic construct
  source 1..19: mol_type = other RNA
caggatggatctggttggt

SEQ ID NO: 1304 - RNA, 19 nt, synthetic construct
  source 1..19: mol_type = other RNA
aggatggatctggttggtg

SEQ ID NO: 1305 - RNA, 19 nt, synthetic construct
  source 1..19: mol_type = other RNA
ggatggatctggttggtgg

SEQ ID NO: 1306 - RNA, 19 nt, synthetic construct
  source 1..19: mol_type = other RNA
gatggatctggttggtgga

SEQ ID NO: 1307 - RNA, 19 nt, synthetic construct
  source 1..19: mol_type = other RNA
atggatctggttggtggat

SEQ ID NO: 1308 - RNA, 19 nt, synthetic construct
  source 1..19: mol_type = other RNA
tggatctggttggtggatg

SEQ ID NO: 1309 - RNA, 19 nt, synthetic construct
  source 1..19: mol_type = other RNA
ggatctggttggtggatga

SEQ ID NO: 1310 - RNA, 19 nt, synthetic construct
  source 1..19: mol_type = other RNA
gatctggttggtggatgaa

SEQ ID NO: 1311 - RNA, 19 nt, synthetic construct
  source 1..19: mol_type = other RNA
atctggttggtggatgaac

SEQ ID NO: 1312 - RNA, 19 nt, synthetic construct
  source 1..19: mol_type = other RNA
tctggttggtggatgaaca

SEQ ID NO: 1313 - RNA, 19 nt, synthetic construct
  source 1..19: mol_type = other RNA
ctggttggtggatgaacaa

SEQ ID NO: 1314 - RNA, 19 nt, synthetic construct
  source 1..19: mol_type = other RNA
tggttggtggatgaacaag

SEQ ID NO: 1315 - RNA, 19 nt, synthetic construct
  source 1..19: mol_type = other RNA
ggttggtggatgaacaagt

SEQ ID NO: 1316 - RNA, 19 nt, synthetic construct
  source 1..19: mol_type = other RNA
gttggtggatgaacaagtg

SEQ ID NO: 1317 - RNA, 19 nt, synthetic construct
  source 1..19: mol_type = other RNA
ttggtggatgaacaagtgt

SEQ ID NO: 1318 - RNA, 19 nt, synthetic construct
  source 1..19: mol_type = other RNA
tggtggatgaacaagtgtc

SEQ ID NO: 1319 - RNA, 19 nt, synthetic construct
  source 1..19: mol_type = other RNA
ggtggatgaacaagtgtca

SEQ ID NO: 1320 - RNA, 19 nt, synthetic construct
  source 1..19: mol_type = other RNA
gtggatgaacaagtgtcac

SEQ ID NO: 1321 - RNA, 19 nt, synthetic construct
  source 1..19: mol_type = other RNA
tggatgaacaagtgtcacg

SEQ ID NO: 1322 - RNA, 19 nt, synthetic construct
  source 1..19: mol_type = other RNA
ggatgaacaagtgtcacgc

SEQ ID NO: 1323 - RNA, 19 nt, synthetic construct
  source 1..19: mol_type = other RNA
gatgaacaagtgtcacgct

SEQ ID NO: 1324 - RNA, 19 nt, synthetic construct
  source 1..19: mol_type = other RNA
atgaacaagtgtcacgctg

SEQ ID NO: 1325 - RNA, 19 nt, synthetic construct
  source 1..19: mol_type = other RNA
tgaacaagtgtcacgctgg

SEQ ID NO: 1326 - RNA, 19 nt, synthetic construct
  source 1..19: mol_type = other RNA
gaacaagtgtcacgctggc

SEQ ID NO: 1327 - RNA, 19 nt, synthetic construct
  source 1..19: mol_type = other RNA
aacaagtgtcacgctggcc

SEQ ID NO: 1328 - RNA, 19 nt, synthetic construct
  source 1..19: mol_type = other RNA
acaagtgtcacgctggcca

SEQ ID NO: 1329 - RNA, 19 nt, synthetic construct
  source 1..19: mol_type = other RNA
caagtgtcacgctggccat

SEQ ID NO: 1330 - RNA, 19 nt, synthetic construct
  source 1..19: mol_type = other RNA
aagtgtcacgctggccatc

SEQ ID NO: 1331 - RNA, 19 nt, synthetic construct
  source 1..19: mol_type = other RNA
agtgtcacgctggccatct

SEQ ID NO: 1332 - RNA, 19 nt, synthetic construct
  source 1..19: mol_type = other RNA
gtgtcacgctggccatctc

SEQ ID NO: 1333 - RNA, 19 nt, synthetic construct
  source 1..19: mol_type = other RNA
tgtcacgctggccatctca

SEQ ID NO: 1334 - RNA, 19 nt, synthetic construct
  source 1..19: mol_type = other RNA
gtcacgctggccatctcaa

SEQ ID NO: 1335 - RNA, 19 nt, synthetic construct
  source 1..19: mol_type = other RNA
tcacgctggccatctcaat

SEQ ID NO: 1336 - RNA, 19 nt, synthetic construct
  source 1..19: mol_type = other RNA
cacgctggccatctcaatg

SEQ ID NO: 1337 - RNA, 19 nt, synthetic construct
  source 1..19: mol_type = other RNA
acgctggccatctcaatgg

SEQ ID NO: 1338 - RNA, 19 nt, synthetic construct
  source 1..19: mol_type = other RNA
cgctggccatctcaatgga

SEQ ID NO: 1339 - RNA, 19 nt, synthetic construct
  source 1..19: mol_type = other RNA
gctggccatctcaatggag

SEQ ID NO: 1340 - RNA, 19 nt, synthetic construct
  source 1..19: mol_type = other RNA
ctggccatctcaatggagt

SEQ ID NO: 1341 - RNA, 19 nt, synthetic construct
  source 1..19: mol_type = other RNA
tggccatctcaatggagtt

SEQ ID NO: 1342 - RNA, 19 nt, synthetic construct
  source 1..19: mol_type = other RNA
ggccatctcaatggagttt

SEQ ID NO: 1343 - RNA, 19 nt, synthetic construct
  source 1..19: mol_type = other RNA
gccatctcaatggagttta

SEQ ID NO: 1344 - RNA, 19 nt, synthetic construct
  source 1..19: mol_type = other RNA
ccatctcaatggagtttat

SEQ ID NO: 1345 - RNA, 19 nt, synthetic construct
  source 1..19: mol_type = other RNA
catctcaatggagtttatt

SEQ ID NO: 1346 - RNA, 19 nt, synthetic construct
  source 1..19: mol_type = other RNA
atctcaatggagtttatta

SEQ ID NO: 1347 - RNA, 19 nt, synthetic construct
  source 1..19: mol_type = other RNA
tctcaatggagtttattac

SEQ ID NO: 1348 - RNA, 19 nt, synthetic construct
  source 1..19: mol_type = other RNA
ctcaatggagtttattacc

SEQ ID NO: 1349 - RNA, 19 nt, synthetic construct
  source 1..19: mol_type = other RNA
tcaatggagtttattacca

SEQ ID NO: 1350 - RNA, 19 nt, synthetic construct
  source 1..19: mol_type = other RNA
caatggagtttattaccaa

SEQ ID NO: 1351 - RNA, 19 nt, synthetic construct
  source 1..19: mol_type = other RNA
aatggagtttattaccaag

SEQ ID NO: 1352 - RNA, 19 nt, synthetic construct
  source 1..19: mol_type = other RNA
atggagtttattaccaagg

SEQ ID NO: 1353 - RNA, 19 nt, synthetic construct
  source 1..19: mol_type = other RNA
tggagtttattaccaaggt

SEQ ID NO: 1354 - RNA, 19 nt, synthetic construct
  source 1..19: mol_type = other RNA
ggagtttattaccaaggtg

SEQ ID NO: 1355 - RNA, 19 nt, synthetic construct
  source 1..19: mol_type = other RNA
gagtttattaccaaggtgg

SEQ ID NO: 1356 - RNA, 19 nt, synthetic construct
  source 1..19: mol_type = other RNA
agtttattaccaaggtggc

SEQ ID NO: 1357 - RNA, 19 nt, synthetic construct
  source 1..19: mol_type = other RNA
gtttattaccaaggtggca

SEQ ID NO: 1358 - RNA, 19 nt, synthetic construct
  source 1..19: mol_type = other RNA
tttattaccaaggtggcac

SEQ ID NO: 1359 - RNA, 19 nt, synthetic construct
  source 1..19: mol_type = other RNA
ttattaccaaggtggcact

SEQ ID NO: 1360 - RNA, 19 nt, synthetic construct
  source 1..19: mol_type = other RNA
tattaccaaggtggcactt

SEQ ID NO: 1361 - RNA, 19 nt, synthetic construct
  source 1..19: mol_type = other RNA
attaccaaggtggcactta

SEQ ID NO: 1362 - RNA, 19 nt, synthetic construct
  source 1..19: mol_type = other RNA
ttaccaaggtggcacttac

SEQ ID NO: 1363 - RNA, 19 nt, synthetic construct
  source 1..19: mol_type = other RNA
taccaaggtggcacttact

SEQ ID NO: 1364 - RNA, 19 nt, synthetic construct
  source 1..19: mol_type = other RNA
accaaggtggcacttactc

SEQ ID NO: 1365 - RNA, 19 nt, synthetic construct
  source 1..19: mol_type = other RNA
ccaaggtggcacttactca

SEQ ID NO: 1366 - RNA, 19 nt, synthetic construct
  source 1..19: mol_type = other RNA
caaggtggcacttactcaa

SEQ ID NO: 1367 - RNA, 19 nt, synthetic construct
  source 1..19: mol_type = other RNA
aaggtggcacttactcaaa

SEQ ID NO: 1368 - RNA, 19 nt, synthetic construct
  source 1..19: mol_type = other RNA
aggtggcacttactcaaaa

SEQ ID NO: 1369 - RNA, 19 nt, synthetic construct
  source 1..19: mol_type = other RNA
ggtggcacttactcaaaag

SEQ ID NO: 1370 - RNA, 19 nt, synthetic construct
  source 1..19: mol_type = other RNA
gtggcacttactcaaaagc

SEQ ID NO: 1371 - RNA, 19 nt, synthetic construct
  source 1..19: mol_type = other RNA
tggcacttactcaaaagca

SEQ ID NO: 1372 - RNA, 19 nt, synthetic construct
  source 1..19: mol_type = other RNA
ggcacttactcaaaagcat

SEQ ID NO: 1373 - RNA, 19 nt, synthetic construct
  source 1..19: mol_type = other RNA
gcacttactcaaaagcatc

SEQ ID NO: 1374 - RNA, 19 nt, synthetic construct
  source 1..19: mol_type = other RNA
cacttactcaaaagcatct

SEQ ID NO: 1375 - RNA, 19 nt, synthetic construct
  source 1..19: mol_type = other RNA
acttactcaaaagcatcta

SEQ ID NO: 1376 - RNA, 19 nt, synthetic construct
  source 1..19: mol_type = other RNA
cttactcaaaagcatctac

SEQ ID NO: 1377 - RNA, 19 nt, synthetic construct
  source 1..19: mol_type = other RNA
ttactcaaaagcatctact

SEQ ID NO: 1378 - RNA, 19 nt, synthetic construct
  source 1..19: mol_type = other RNA
tactcaaaagcatctactc

SEQ ID NO: 1379 - RNA, 19 nt, synthetic construct
  source 1..19: mol_type = other RNA
actcaaaagcatctactcc

SEQ ID NO: 1380 - RNA, 19 nt, synthetic construct
  source 1..19: mol_type = other RNA
ctcaaaagcatctactcct

SEQ ID NO: 1381 - RNA, 19 nt, synthetic construct
  source 1..19: mol_type = other RNA
tcaaaagcatctactccta

SEQ ID NO: 1382 - RNA, 19 nt, synthetic construct
  source 1..19: mol_type = other RNA
caaaagcatctactcctaa

SEQ ID NO: 1383 - RNA, 19 nt, synthetic construct
  source 1..19: mol_type = other RNA
aaaagcatctactcctaat

SEQ ID NO: 1384 - RNA, 19 nt, synthetic construct
  source 1..19: mol_type = other RNA
aaagcatctactcctaatg

SEQ ID NO: 1385 - RNA, 19 nt, synthetic construct
  source 1..19: mol_type = other RNA
aagcatctactcctaatgg

SEQ ID NO: 1386 - RNA, 19 nt, synthetic construct
  source 1..19: mol_type = other RNA
agcatctactcctaatggt

SEQ ID NO: 1387 - RNA, 19 nt, synthetic construct
  source 1..19: mol_type = other RNA
gcatctactcctaatggtt

SEQ ID NO: 1388 - RNA, 19 nt, synthetic construct
  source 1..19: mol_type = other RNA
catctactcctaatggtta

SEQ ID NO: 1389 - RNA, 19 nt, synthetic construct
  source 1..19: mol_type = other RNA
atctactcctaatggttat

SEQ ID NO: 1390 - RNA, 19 nt, synthetic construct
  source 1..19: mol_type = other RNA
tctactcctaatggttatg

SEQ ID NO: 1391 - RNA, 19 nt, synthetic construct
  source 1..19: mol_type = other RNA
ctactcctaatggttatga

SEQ ID NO: 1392 - RNA, 19 nt, synthetic construct
  source 1..19: mol_type = other RNA
tactcctaatggttatgat

SEQ ID NO: 1393 - RNA, 19 nt, synthetic construct
  source 1..19: mol_type = other RNA
actcctaatggttatgata

SEQ ID NO: 1394 - RNA, 19 nt, synthetic construct
  source 1..19: mol_type = other RNA
ctcctaatggttatgataa

SEQ ID NO: 1395 - RNA, 19 nt, synthetic construct
  source 1..19: mol_type = other RNA
tcctaatggttatgataat

SEQ ID NO: 1396 - RNA, 19 nt, synthetic construct
  source 1..19: mol_type = other RNA
cctaatggttatgataatg

SEQ ID NO: 1397 - RNA, 19 nt, synthetic construct
  source 1..19: mol_type = other RNA
ctaatggttatgataatgg

SEQ ID NO: 1398 - RNA, 19 nt, synthetic construct
  source 1..19: mol_type = other RNA
taatggttatgataatggc

SEQ ID NO: 1399 - RNA, 19 nt, synthetic construct
  source 1..19: mol_type = other RNA
aatggttatgataatggca

SEQ ID NO: 1400 - RNA, 19 nt, synthetic construct
  source 1..19: mol_type = other RNA
atggttatgataatggcat

SEQ ID NO: 1401 - RNA, 19 nt, synthetic construct
  source 1..19: mol_type = other RNA
tggttatgataatggcatt

SEQ ID NO: 1402 - RNA, 19 nt, synthetic construct
  source 1..19: mol_type = other RNA
ggttatgataatggcatta

SEQ ID NO: 1403 - RNA, 19 nt, synthetic construct
  source 1..19: mol_type = other RNA
gttatgataatggcattat

SEQ ID NO: 1404 - RNA, 19 nt, synthetic construct
  source 1..19: mol_type = other RNA
ttatgataatggcattatt

SEQ ID NO: 1405 - RNA, 19 nt, synthetic construct
  source 1..19: mol_type = other RNA
tatgataatggcattattt

SEQ ID NO: 1406 - RNA, 19 nt, synthetic construct
  source 1..19: mol_type = other RNA
atgataatggcattatttg

SEQ ID NO: 1407 - RNA, 19 nt, synthetic construct
  source 1..19: mol_type = other RNA
tgataatggcattatttgg

SEQ ID NO: 1408 - RNA, 19 nt, synthetic construct
  source 1..19: mol_type = other RNA
gataatggcattatttggg

SEQ ID NO: 1409 - RNA, 19 nt, synthetic construct
  source 1..19: mol_type = other RNA
ataatggcattatttgggc

SEQ ID NO: 1410 - RNA, 19 nt, synthetic construct
  source 1..19: mol_type = other RNA
taatggcattatttgggcc

SEQ ID NO: 1411 - RNA, 19 nt, synthetic construct
  source 1..19: mol_type = other RNA
aatggcattatttgggcca

SEQ ID NO: 1412 - RNA, 19 nt, synthetic construct
  source 1..19: mol_type = other RNA
atggcattatttgggccac

SEQ ID NO: 1413 - RNA, 19 nt, synthetic construct
  source 1..19: mol_type = other RNA
tggcattatttgggccact

SEQ ID NO: 1414 - RNA, 19 nt, synthetic construct
  source 1..19: mol_type = other RNA
ggcattatttgggccactt

SEQ ID NO: 1415 - RNA, 19 nt, synthetic construct
  source 1..19: mol_type = other RNA
gcattatttgggccacttg

SEQ ID NO: 1416 - RNA, 19 nt, synthetic construct
  source 1..19: mol_type = other RNA
cattatttgggccacttgg

SEQ ID NO: 1417 - RNA, 19 nt, synthetic construct
  source 1..19: mol_type = other RNA
attatttgggccacttgga

SEQ ID NO: 1418 - RNA, 19 nt, synthetic construct
  source 1..19: mol_type = other RNA
ttatttgggccacttggaa

SEQ ID NO: 1419 - RNA, 19 nt, synthetic construct
  source 1..19: mol_type = other RNA
tatttgggccacttggaaa

SEQ ID NO: 1420 - RNA, 19 nt, synthetic construct
  source 1..19: mol_type = other RNA
atttgggccacttggaaaa

SEQ ID NO: 1421 - RNA, 19 nt, synthetic construct
  source 1..19: mol_type = other RNA
tttgggccacttggaaaac

SEQ ID NO: 1422 - RNA, 19 nt, synthetic construct
  source 1..19: mol_type = other RNA
ttgggccacttggaaaacc

SEQ ID NO: 1423 - RNA, 19 nt, synthetic construct
  source 1..19: mol_type = other RNA
tgggccacttggaaaaccc

SEQ ID NO: 1424 - RNA, 19 nt, synthetic construct
  source 1..19: mol_type = other RNA
gggccacttggaaaacccg

SEQ ID NO: 1425 - RNA, 19 nt, synthetic construct
  source 1..19: mol_type = other RNA
ggccacttggaaaacccgg

SEQ ID NO: 1426 - RNA, 19 nt, synthetic construct
  source 1..19: mol_type = other RNA
gccacttggaaaacccggt

SEQ ID NO: 1427 - RNA, 19 nt, synthetic construct
  source 1..19: mol_type = other RNA
ccacttggaaaacccggtg

SEQ ID NO: 1428 - RNA, 19 nt, synthetic construct
  source 1..19: mol_type = other RNA
cacttggaaaacccggtgg

SEQ ID NO: 1429 - RNA, 19 nt, synthetic construct
  source 1..19: mol_type = other RNA
acttggaaaacccggtggt

SEQ ID NO: 1430 - RNA, 19 nt, synthetic construct
  source 1..19: mol_type = other RNA
cttggaaaacccggtggta

SEQ ID NO: 1431 - RNA, 19 nt, synthetic construct
  source 1..19: mol_type = other RNA
ttggaaaacccggtggtat

SEQ ID NO: 1432 - RNA, 19 nt, synthetic construct
  source 1..19: mol_type = other RNA
tggaaaacccggtggtatt

SEQ ID NO: 1433 - RNA, 19 nt, synthetic construct
  source 1..19: mol_type = other RNA
ggaaaacccggtggtattc

SEQ ID NO: 1434 - RNA, 19 nt, synthetic construct
  source 1..19: mol_type = other RNA
gaaaacccggtggtattcc

SEQ ID NO: 1435 - RNA, 19 nt, synthetic construct
  source 1..19: mol_type = other RNA
aaaacccggtggtattcca

SEQ ID NO: 1436 - RNA, 19 nt, synthetic construct
  source 1..19: mol_type = other RNA
aaacccggtggtattccat

SEQ ID NO: 1437 - RNA, 19 nt, synthetic construct
  source 1..19: mol_type = other RNA
aacccggtggtattccatg

SEQ ID NO: 1438 - RNA, 19 nt, synthetic construct
  source 1..19: mol_type = other RNA
acccggtggtattccatga

SEQ ID NO: 1439 - RNA, 19 nt, synthetic construct
  source 1..19: mol_type = other RNA
cccggtggtattccatgaa

SEQ ID NO: 1440 - RNA, 19 nt, synthetic construct
  source 1..19: mol_type = other RNA
ccggtggtattccatgaag

SEQ ID NO: 1441 - RNA, 19 nt, synthetic construct
  source 1..19: mol_type = other RNA
cggtggtattccatgaaga

SEQ ID NO: 1442 - RNA, 19 nt, synthetic construct
  source 1..19: mol_type = other RNA
ggtggtattccatgaagaa

SEQ ID NO: 1443 - RNA, 19 nt, synthetic construct
  source 1..19: mol_type = other RNA
gtggtattccatgaagaaa

SEQ ID NO: 1444 - RNA, 19 nt, synthetic construct
  source 1..19: mol_type = other RNA
tggtattccatgaagaaaa

SEQ ID NO: 1445 - RNA, 19 nt, synthetic construct
  source 1..19: mol_type = other RNA
ggtattccatgaagaaaac

SEQ ID NO: 1446 - RNA, 19 nt, synthetic construct
  source 1..19: mol_type = other RNA
gtattccatgaagaaaacc

SEQ ID NO: 1447 - RNA, 19 nt, synthetic construct
  source 1..19: mol_type = other RNA
tattccatgaagaaaacca

SEQ ID NO: 1448 - RNA, 19 nt, synthetic construct
  source 1..19: mol_type = other RNA
attccatgaagaaaaccac

SEQ ID NO: 1449 - RNA, 19 nt, synthetic construct
  source 1..19: mol_type = other RNA
ttccatgaagaaaaccact

SEQ ID NO: 1450 - RNA, 19 nt, synthetic construct
  source 1..19: mol_type = other RNA
tccatgaagaaaaccacta

SEQ ID NO: 1451 - RNA, 19 nt, synthetic construct
  source 1..19: mol_type = other RNA
ccatgaagaaaaccactat

SEQ ID NO: 1452 - RNA, 19 nt, synthetic construct
  source 1..19: mol_type = other RNA
catgaagaaaaccactatg

SEQ ID NO: 1453 - RNA, 19 nt, synthetic construct
  source 1..19: mol_type = other RNA
atgaagaaaaccactatga

SEQ ID NO: 1454 - RNA, 19 nt, synthetic construct
  source 1..19: mol_type = other RNA
tgaagaaaaccactatgaa

SEQ ID NO: 1455 - RNA, 19 nt, synthetic construct
  source 1..19: mol_type = other RNA
gaagaaaaccactatgaag

SEQ ID NO: 1456 - RNA, 19 nt, synthetic construct
  source 1..19: mol_type = other RNA
aagaaaaccactatgaaga

SEQ ID NO: 1457 - RNA, 19 nt, synthetic construct
  source 1..19: mol_type = other RNA
agaaaaccactatgaagat

SEQ ID NO: 1458 - RNA, 19 nt, synthetic construct
  source 1..19: mol_type = other RNA
gaaaaccactatgaagata

SEQ ID NO: 1459 - RNA, 19 nt, synthetic construct
  source 1..19: mol_type = other RNA
aaaaccactatgaagataa

SEQ ID NO: 1460 - RNA, 19 nt, synthetic construct
  source 1..19: mol_type = other RNA
aaaccactatgaagataat

SEQ ID NO: 1461 - RNA, 19 nt, synthetic construct
  source 1..19: mol_type = other RNA
aaccactatgaagataatc

SEQ ID NO: 1462 - RNA, 19 nt, synthetic construct
  source 1..19: mol_type = other RNA
accactatgaagataatcc

SEQ ID NO: 1463 - RNA, 19 nt, synthetic construct
  source 1..19: mol_type = other RNA
ccactatgaagataatccc

SEQ ID NO: 1464 - RNA, 19 nt, synthetic construct
  source 1..19: mol_type = other RNA
cactatgaagataatccca

SEQ ID NO: 1465 - RNA, 19 nt, synthetic construct
  source 1..19: mol_type = other RNA
actatgaagataatcccat

SEQ ID NO: 1466 - RNA, 19 nt, synthetic construct
  source 1..19: mol_type = other RNA
ctatgaagataatcccatt

SEQ ID NO: 1467 - RNA, 19 nt, synthetic construct
  source 1..19: mol_type = other RNA
tatgaagataatcccattc

SEQ ID NO: 1468 - RNA, 19 nt, synthetic construct
  source 1..19: mol_type = other RNA
atgaagataatcccattca

SEQ ID NO: 1469 - RNA, 19 nt, synthetic construct
  source 1..19: mol_type = other RNA
tgaagataatcccattcaa

SEQ ID NO: 1470 - RNA, 19 nt, synthetic construct
  source 1..19: mol_type = other RNA
gaagataatcccattcaac

SEQ ID NO: 1471 - RNA, 19 nt, synthetic construct
  source 1..19: mol_type = other RNA
aagataatcccattcaaca

SEQ ID NO: 1472 - RNA, 19 nt, synthetic construct
  source 1..19: mol_type = other RNA
agataatcccattcaacag

SEQ ID NO: 1473 - RNA, 19 nt, synthetic construct
  source 1..19: mol_type = other RNA
gataatcccattcaacaga

SEQ ID NO: 1474 - RNA, 19 nt, synthetic construct
  source 1..19: mol_type = other RNA
ataatcccattcaacagac

SEQ ID NO: 1475 - RNA, 19 nt, synthetic construct
  source 1..19: mol_type = other RNA
taatcccattcaacagact

SEQ ID NO: 1476 - RNA, 19 nt, synthetic construct
  source 1..19: mol_type = other RNA
aatcccattcaacagactc

SEQ ID NO: 1477 - RNA, 19 nt, synthetic construct
  source 1..19: mol_type = other RNA
atcccattcaacagactca

SEQ ID NO: 1478 - RNA, 19 nt, synthetic construct
  source 1..19: mol_type = other RNA
tcccattcaacagactcac

SEQ ID NO: 1479 - RNA, 19 nt, synthetic construct
  source 1..19: mol_type = other RNA
cccattcaacagactcaca

SEQ ID NO: 1480 - RNA, 19 nt, synthetic construct
  source 1..19: mol_type = other RNA
ccattcaacagactcacaa

SEQ ID NO: 1481 - RNA, 19 nt, synthetic construct
  source 1..19: mol_type = other RNA
cattcaacagactcacaat

SEQ ID NO: 1482 - RNA, 19 nt, synthetic construct
  source 1..19: mol_type = other RNA
attcaacagactcacaatt

SEQ ID NO: 1483 - RNA, 19 nt, synthetic construct
  source 1..19: mol_type = other RNA
ttcaacagactcacaattg

SEQ ID NO: 1484 - RNA, 19 nt, synthetic construct
  source 1..19: mol_type = other RNA
tcaacagactcacaattgg

SEQ ID NO: 1485 - RNA, 19 nt, synthetic construct
  source 1..19: mol_type = other RNA
caacagactcacaattgga

SEQ ID NO: 1486 - RNA, 19 nt, synthetic construct
  source 1..19: mol_type = other RNA
aacagactcacaattggag

SEQ ID NO: 1487 - RNA, 19 nt, synthetic construct
  source 1..19: mol_type = other RNA
acagactcacaattggaga

SEQ ID NO: 1488 - RNA, 19 nt, synthetic construct
  source 1..19: mol_type = other RNA
cagactcacaattggagaa

SEQ ID NO: 1489 - RNA, 19 nt, synthetic construct
  source 1..19: mol_type = other RNA
agactcacaattggagaag

SEQ ID NO: 1490 - RNA, 19 nt, synthetic construct
  source 1..19: mol_type = other RNA
gactcacaattggagaagg

SEQ ID NO: 1491 - RNA, 19 nt, synthetic construct
  source 1..19: mol_type = other RNA
actcacaattggagaagga

SEQ ID NO: 1492 - RNA, 19 nt, synthetic construct
  source 1..19: mol_type = other RNA
ctcacaattggagaaggac

SEQ ID NO: 1493 - RNA, 19 nt, synthetic construct
  source 1..19: mol_type = other RNA
tcacaattggagaaggaca

SEQ ID NO: 1494 - RNA, 19 nt, synthetic construct
  source 1..19: mol_type = other RNA
cacaattggagaaggacag

SEQ ID NO: 1495 - RNA, 19 nt, synthetic construct
  source 1..19: mol_type = other RNA
acaattggagaaggacagc

SEQ ID NO: 1496 - RNA, 19 nt, synthetic construct
  source 1..19: mol_type = other RNA
caattggagaaggacagca

SEQ ID NO: 1497 - RNA, 19 nt, synthetic construct
  source 1..19: mol_type = other RNA
aattggagaaggacagcaa

SEQ ID NO: 1498 - RNA, 19 nt, synthetic construct
  source 1..19: mol_type = other RNA
attggagaaggacagcaac

SEQ ID NO: 1499 - RNA, 19 nt, synthetic construct
  source 1..19: mol_type = other RNA
ttggagaaggacagcaaca

SEQ ID NO: 1500 - RNA, 19 nt, synthetic construct
  source 1..19: mol_type = other RNA
tggagaaggacagcaacac

SEQ ID NO: 1501 - RNA, 19 nt, synthetic construct
  source 1..19: mol_type = other RNA
ggagaaggacagcaacacc

SEQ ID NO: 1502 - RNA, 19 nt, synthetic construct
  source 1..19: mol_type = other RNA
gagaaggacagcaacacca

SEQ ID NO: 1503 - RNA, 19 nt, synthetic construct
  source 1..19: mol_type = other RNA
agaaggacagcaacaccac

SEQ ID NO: 1504 - RNA, 19 nt, synthetic construct
  source 1..19: mol_type = other RNA
gaaggacagcaacaccacc

SEQ ID NO: 1505 - RNA, 19 nt, synthetic construct
  source 1..19: mol_type = other RNA
aaggacagcaacaccacct

SEQ ID NO: 1506 - RNA, 19 nt, synthetic construct
  source 1..19: mol_type = other RNA
aggacagcaacaccacctg

SEQ ID NO: 1507 - RNA, 19 nt, synthetic construct
  source 1..19: mol_type = other RNA
ggacagcaacaccacctgg

SEQ ID NO: 1508 - RNA, 19 nt, synthetic construct
  source 1..19: mol_type = other RNA
gacagcaacaccacctggg

SEQ ID NO: 1509 - RNA, 19 nt, synthetic construct
  source 1..19: mol_type = other RNA
acagcaacaccacctgggg

SEQ ID NO: 1510 - RNA, 19 nt, synthetic construct
  source 1..19: mol_type = other RNA
cagcaacaccacctggggg

SEQ ID NO: 1511 - RNA, 19 nt, synthetic construct
  source 1..19: mol_type = other RNA
agcaacaccacctgggggg

SEQ ID NO: 1512 - RNA, 19 nt, synthetic construct
  source 1..19: mol_type = other RNA
gcaacaccacctgggggga

SEQ ID NO: 1513 - RNA, 19 nt, synthetic construct
  source 1..19: mol_type = other RNA
caacaccacctggggggag

SEQ ID NO: 1514 - RNA, 19 nt, synthetic construct
  source 1..19: mol_type = other RNA
aacaccacctggggggagc

SEQ ID NO: 1515 - RNA, 19 nt, synthetic construct
  source 1..19: mol_type = other RNA
acaccacctggggggagcc

SEQ ID NO: 1516 - RNA, 19 nt, synthetic construct
  source 1..19: mol_type = other RNA
caccacctggggggagcca

SEQ ID NO: 1517 - RNA, 19 nt, synthetic construct
  source 1..19: mol_type = other RNA
accacctggggggagccaa

SEQ ID NO: 1518 - RNA, 19 nt, synthetic construct
  source 1..19: mol_type = other RNA
ccacctggggggagccaaa

SEQ ID NO: 1519 - RNA, 19 nt, synthetic construct
  source 1..19: mol_type = other RNA
cacctggggggagccaaac

SEQ ID NO: 1520 - RNA, 19 nt, synthetic construct
  source 1..19: mol_type = other RNA
acctggggggagccaaaca

SEQ ID NO: 1521 - RNA, 19 nt, synthetic construct
  source 1..19: mol_type = other RNA
cctggggggagccaaacag

SEQ ID NO: 1522 - RNA, 19 nt, synthetic construct
  source 1..19: mol_type = other RNA
ctggggggagccaaacagg

SEQ ID NO: 1523 - RNA, 19 nt, synthetic construct
  source 1..19: mol_type = other RNA
tggggggagccaaacaggc

SEQ ID NO: 1524 - RNA, 19 nt, synthetic construct
  source 1..19: mol_type = other RNA
ggggggagccaaacaggct

SEQ ID NO: 1525 - RNA, 19 nt, synthetic construct
  source 1..19: mol_type = other RNA
gggggagccaaacaggctg

SEQ ID NO: 1526 - RNA, 19 nt, synthetic construct
  source 1..19: mol_type = other RNA
ggggagccaaacaggctgg

SEQ ID NO: 1527 - RNA, 19 nt, synthetic construct
  source 1..19: mol_type = other RNA
gggagccaaacaggctgga

SEQ ID NO: 1528 - RNA, 19 nt, synthetic construct
  source 1..19: mol_type = other RNA
ggagccaaacaggctggag

SEQ ID NO: 1529 - RNA, 19 nt, synthetic construct
  source 1..19: mol_type = other RNA
gagccaaacaggctggaga

SEQ ID NO: 1530 - RNA, 19 nt, synthetic construct
  source 1..19: mol_type = other RNA
agccaaacaggctggagac

SEQ ID NO: 1531 - RNA, 19 nt, synthetic construct
  source 1..19: mol_type = other RNA
gccaaacaggctggagacg

SEQ ID NO: 1532 - RNA, 19 nt, synthetic construct
  source 1..19: mol_type = other RNA
ccaaacaggctggagacgt

SEQ ID NO: 1533 - RNA, 19 nt, synthetic construct
  source 1..19: mol_type = other RNA
caaacaggctggagacgtt

SEQ ID NO: 1534 - RNA, 19 nt, synthetic construct
  source 1..19: mol_type = other RNA
aaacaggctggagacgttt

SEQ ID NO: 1535 - RNA, 19 nt, synthetic construct
  source 1..19: mol_type = other RNA
aacaggctggagacgttta

SEQ ID NO: 1536 - RNA, 19 nt, synthetic construct
  source 1..19: mol_type = other RNA
acaggctggagacgtttaa

SEQ ID NO: 1537 - RNA, 19 nt, synthetic construct
  source 1..19: mol_type = other RNA
caggctggagacgtttaaa

SEQ ID NO: 1538 - RNA, 19 nt, synthetic construct
  source 1..19: mol_type = other RNA
aggctggagacgtttaaaa

SEQ ID NO: 1539 - RNA, 19 nt, synthetic construct
  source 1..19: mol_type = other RNA
ggctggagacgtttaaaag

SEQ ID NO: 1540 - RNA, 19 nt, synthetic construct
  source 1..19: mol_type = other RNA
gctggagacgtttaaaaga

SEQ ID NO: 1541 - RNA, 19 nt, synthetic construct
  source 1..19: mol_type = other RNA
ctggagacgtttaaaagac

SEQ ID NO: 1542 - RNA, 19 nt, synthetic construct
  source 1..19: mol_type = other RNA
tggagacgtttaaaagacc

SEQ ID NO: 1543 - RNA, 19 nt, synthetic construct
  source 1..19: mol_type = other RNA
ggagacgtttaaaagaccg

SEQ ID NO: 1544 - RNA, 19 nt, synthetic construct
  source 1..19: mol_type = other RNA
gagacgtttaaaagaccgt

SEQ ID NO: 1545 - RNA, 19 nt, synthetic construct
  source 1..19: mol_type = other RNA
agacgtttaaaagaccgtt

SEQ ID NO: 1546 - RNA, 19 nt, synthetic construct
  source 1..19: mol_type = other RNA
gacgtttaaaagaccgttt

SEQ ID NO: 1547 - RNA, 19 nt, synthetic construct
  source 1..19: mol_type = other RNA
acgtttaaaagaccgtttc

SEQ ID NO: 1548 - RNA, 19 nt, synthetic construct
  source 1..19: mol_type = other RNA
cgtttaaaagaccgtttca

SEQ ID NO: 1549 - RNA, 19 nt, synthetic construct
  source 1..19: mol_type = other RNA
gtttaaaagaccgtttcaa

SEQ ID NO: 1550 - RNA, 19 nt, synthetic construct
  source 1..19: mol_type = other RNA
tttaaaagaccgtttcaaa

SEQ ID NO: 1551 - RNA, 19 nt, synthetic construct
  source 1..19: mol_type = other RNA
ttaaaagaccgtttcaaaa

SEQ ID NO: 1552 - RNA, 19 nt, synthetic construct
  source 1..19: mol_type = other RNA
taaaagaccgtttcaaaag

SEQ ID NO: 1553 - RNA, 19 nt, synthetic construct
  source 1..19: mol_type = other RNA
aaaagaccgtttcaaaaga

SEQ ID NO: 1554 - RNA, 19 nt, synthetic construct
  source 1..19: mol_type = other RNA
aaagaccgtttcaaaagag

SEQ ID NO: 1555 - RNA, 19 nt, synthetic construct
  source 1..19: mol_type = other RNA
aagaccgtttcaaaagaga

SEQ ID NO: 1556 - RNA, 19 nt, synthetic construct
  source 1..19: mol_type = other RNA
agaccgtttcaaaagagat

SEQ ID NO: 1557 - RNA, 19 nt, synthetic construct
  source 1..19: mol_type = other RNA
gaccgtttcaaaagagatt

SEQ ID NO: 1558 - RNA, 19 nt, synthetic construct
  source 1..19: mol_type = other RNA
accgtttcaaaagagattt

SEQ ID NO: 1559 - RNA, 19 nt, synthetic construct
  source 1..19: mol_type = other RNA
ccgtttcaaaagagattta

SEQ ID NO: 1560 - RNA, 19 nt, synthetic construct
  source 1..19: mol_type = other RNA
cgtttcaaaagagatttac

SEQ ID NO: 1561 - RNA, 19 nt, synthetic construct
  source 1..19: mol_type = other RNA
gtttcaaaagagatttact

SEQ ID NO: 1562 - RNA, 19 nt, synthetic construct
  source 1..19: mol_type = other RNA
tttcaaaagagatttactt

SEQ ID NO: 1563 - RNA, 19 nt, synthetic construct
  source 1..19: mol_type = other RNA
ttcaaaagagatttacttt

SEQ ID NO: 1564 - RNA, 19 nt, synthetic construct
  source 1..19: mol_type = other RNA
tcaaaagagatttactttt

SEQ ID NO: 1565 - RNA, 19 nt, synthetic construct
  source 1..19: mol_type = other RNA
caaaagagatttacttttt

SEQ ID NO: 1566 - RNA, 19 nt, synthetic construct
  source 1..19: mol_type = other RNA
aaaagagatttactttttt

SEQ ID NO: 1567 - RNA, 19 nt, synthetic construct
  source 1..19: mol_type = other RNA
aaagagatttactttttta

SEQ ID NO: 1568 - RNA, 19 nt, synthetic construct
  source 1..19: mol_type = other RNA
aagagatttacttttttaa

SEQ ID NO: 1569 - RNA, 19 nt, synthetic construct
  source 1..19: mol_type = other RNA
agagatttacttttttaaa

SEQ ID NO: 1570 - RNA, 19 nt, synthetic construct
  source 1..19: mol_type = other RNA
gagatttacttttttaaag

SEQ ID NO: 1571 - RNA, 19 nt, synthetic construct
  source 1..19: mol_type = other RNA
agatttacttttttaaagg

SEQ ID NO: 1572 - RNA, 19 nt, synthetic construct
  source 1..19: mol_type = other RNA
gatttacttttttaaagga

SEQ ID NO: 1573 - RNA, 19 nt, synthetic construct
  source 1..19: mol_type = other RNA
atttacttttttaaaggac

SEQ ID NO: 1574 - RNA, 19 nt, synthetic construct
  source 1..19: mol_type = other RNA
tttacttttttaaaggact

SEQ ID NO: 1575 - RNA, 19 nt, synthetic construct
  source 1..19: mol_type = other RNA
ttacttttttaaaggactt

SEQ ID NO: 1576 - RNA, 19 nt, synthetic construct
  source 1..19: mol_type = other RNA
tacttttttaaaggacttt

SEQ ID NO: 1577 - RNA, 19 nt, synthetic construct
  source 1..19: mol_type = other RNA
acttttttaaaggacttta

SEQ ID NO: 1578 - RNA, 19 nt, synthetic construct
  source 1..19: mol_type = other RNA
cttttttaaaggactttat

SEQ ID NO: 1579 - RNA, 19 nt, synthetic construct
  source 1..19: mol_type = other RNA
ttttttaaaggactttatc

SEQ ID NO: 1580 - RNA, 19 nt, synthetic construct
  source 1..19: mol_type = other RNA
tttttaaaggactttatct

SEQ ID NO: 1581 - RNA, 19 nt, synthetic construct
  source 1..19: mol_type = other RNA
ttttaaaggactttatctg

SEQ ID NO: 1582 - RNA, 19 nt, synthetic construct
  source 1..19: mol_type = other RNA
tttaaaggactttatctga

SEQ ID NO: 1583 - RNA, 19 nt, synthetic construct
  source 1..19: mol_type = other RNA
ttaaaggactttatctgaa

SEQ ID NO: 1584 - RNA, 19 nt, synthetic construct
  source 1..19: mol_type = other RNA
taaaggactttatctgaac

SEQ ID NO: 1585 - RNA, 19 nt, synthetic construct
  source 1..19: mol_type = other RNA
aaaggactttatctgaaca

SEQ ID NO: 1586 - RNA, 19 nt, synthetic construct
  source 1..19: mol_type = other RNA
aaggactttatctgaacag

SEQ ID NO: 1587 - RNA, 19 nt, synthetic construct
  source 1..19: mol_type = other RNA
aggactttatctgaacaga

SEQ ID NO: 1588 - RNA, 19 nt, synthetic construct
  source 1..19: mol_type = other RNA
ggactttatctgaacagag

SEQ ID NO: 1589 - RNA, 19 nt, synthetic construct
  source 1..19: mol_type = other RNA
gactttatctgaacagaga

SEQ ID NO: 1590 - RNA, 19 nt, synthetic construct
  source 1..19: mol_type = other RNA
actttatctgaacagagag

SEQ ID NO: 1591 - RNA, 19 nt, synthetic construct
  source 1..19: mol_type = other RNA
ctttatctgaacagagaga

SEQ ID NO: 1592 - RNA, 19 nt, synthetic construct
  source 1..19: mol_type = other RNA
tttatctgaacagagagat

SEQ ID NO: 1593 - RNA, 19 nt, synthetic construct
  source 1..19: mol_type = other RNA
ttatctgaacagagagata

SEQ ID NO: 1594 - RNA, 19 nt, synthetic construct
  source 1..19: mol_type = other RNA
tatctgaacagagagatat

SEQ ID NO: 1595 - RNA, 19 nt, synthetic construct
  source 1..19: mol_type = other RNA
atctgaacagagagatata

SEQ ID NO: 1596 - RNA, 19 nt, synthetic construct
  source 1..19: mol_type = other RNA
tctgaacagagagatataa

SEQ ID NO: 1597 - RNA, 19 nt, synthetic construct
  source 1..19: mol_type = other RNA
ctgaacagagagatataat

SEQ ID NO: 1598 - RNA, 19 nt, synthetic construct
  source 1..19: mol_type = other RNA
tgaacagagagatataata

SEQ ID NO: 1599 - RNA, 19 nt, synthetic construct
  source 1..19: mol_type = other RNA
gaacagagagatataatat

SEQ ID NO: 1600 - RNA, 19 nt, synthetic construct
  source 1..19: mol_type = other RNA
aacagagagatataatatt

SEQ ID NO: 1601 - RNA, 19 nt, synthetic construct
  source 1..19: mol_type = other RNA
acagagagatataatattt

SEQ ID NO: 1602 - RNA, 19 nt, synthetic construct
  source 1..19: mol_type = other RNA
cagagagatataatatttt

SEQ ID NO: 1603 - RNA, 19 nt, synthetic construct
  source 1..19: mol_type = other RNA
agagagatataatattttt

SEQ ID NO: 1604 - RNA, 19 nt, synthetic construct
  source 1..19: mol_type = other RNA
gagagatataatatttttc

SEQ ID NO: 1605 - RNA, 19 nt, synthetic construct
  source 1..19: mol_type = other RNA
agagatataatatttttcc

SEQ ID NO: 1606 - RNA, 19 nt, synthetic construct
  source 1..19: mol_type = other RNA
gagatataatatttttcct

SEQ ID NO: 1607 - RNA, 19 nt, synthetic construct
  source 1..19: mol_type = other RNA
agatataatatttttccta

SEQ ID NO: 1608 - RNA, 19 nt, synthetic construct
  source 1..19: mol_type = other RNA
gatataatatttttcctat

SEQ ID NO: 1609 - RNA, 19 nt, synthetic construct
  source 1..19: mol_type = other RNA
atataatatttttcctatt

SEQ ID NO: 1610 - RNA, 19 nt, synthetic construct
  source 1..19: mol_type = other RNA
tataatatttttcctattg

SEQ ID NO: 1611 - RNA, 19 nt, synthetic construct
  source 1..19: mol_type = other RNA
ataatatttttcctattgg

SEQ ID NO: 1612 - RNA, 19 nt, synthetic construct
  source 1..19: mol_type = other RNA
taatatttttcctattgga

SEQ ID NO: 1613 - RNA, 19 nt, synthetic construct
  source 1..19: mol_type = other RNA
aatatttttcctattggac

SEQ ID NO: 1614 - RNA, 19 nt, synthetic construct
  source 1..19: mol_type = other RNA
atatttttcctattggaca

SEQ ID NO: 1615 - RNA, 19 nt, synthetic construct
  source 1..19: mol_type = other RNA
tatttttcctattggacaa

SEQ ID NO: 1616 - RNA, 19 nt, synthetic construct
  source 1..19: mol_type = other RNA
atttttcctattggacaat

SEQ ID NO: 1617 - RNA, 19 nt, synthetic construct
  source 1..19: mol_type = other RNA
tttttcctattggacaatg

SEQ ID NO: 1618 - RNA, 19 nt, synthetic construct
  source 1..19: mol_type = other RNA
ttttcctattggacaatgg

SEQ ID NO: 1619 - RNA, 19 nt, synthetic construct
  source 1..19: mol_type = other RNA
tttcctattggacaatgga

SEQ ID NO: 1620 - RNA, 19 nt, synthetic construct
  source 1..19: mol_type = other RNA
ttcctattggacaatggac

SEQ ID NO: 1621 - RNA, 19 nt, synthetic construct
  source 1..19: mol_type = other RNA
tcctattggacaatggact

SEQ ID NO: 1622 - RNA, 19 nt, synthetic construct
  source 1..19: mol_type = other RNA
cctattggacaatggactt

SEQ ID NO: 1623 - RNA, 19 nt, synthetic construct
  source 1..19: mol_type = other RNA
ctattggacaatggacttg

SEQ ID NO: 1624 - RNA, 19 nt, synthetic construct
  source 1..19: mol_type = other RNA
tattggacaatggacttgc

SEQ ID NO: 1625 - RNA, 19 nt, synthetic construct
  source 1..19: mol_type = other RNA
attggacaatggacttgca

SEQ ID NO: 1626 - RNA, 19 nt, synthetic construct
  source 1..19: mol_type = other RNA
ttggacaatggacttgcaa

SEQ ID NO: 1627 - RNA, 19 nt, synthetic construct
  source 1..19: mol_type = other RNA
tggacaatggacttgcaaa

SEQ ID NO: 1628 - RNA, 19 nt, synthetic construct
  source 1..19: mol_type = other RNA
ggacaatggacttgcaaag

SEQ ID NO: 1629 - RNA, 19 nt, synthetic construct
  source 1..19: mol_type = other RNA
gacaatggacttgcaaagc

SEQ ID NO: 1630 - RNA, 19 nt, synthetic construct
  source 1..19: mol_type = other RNA
acaatggacttgcaaagct

SEQ ID NO: 1631 - RNA, 19 nt, synthetic construct
  source 1..19: mol_type = other RNA
caatggacttgcaaagctt

SEQ ID NO: 1632 - RNA, 19 nt, synthetic construct
  source 1..19: mol_type = other RNA
aatggacttgcaaagcttc

SEQ ID NO: 1633 - RNA, 19 nt, synthetic construct
  source 1..19: mol_type = other RNA
atggacttgcaaagcttca

SEQ ID NO: 1634 - RNA, 19 nt, synthetic construct
  source 1..19: mol_type = other RNA
tggacttgcaaagcttcac

SEQ ID NO: 1635 - RNA, 19 nt, synthetic construct
  source 1..19: mol_type = other RNA
ggacttgcaaagcttcact

SEQ ID NO: 1636 - RNA, 19 nt, synthetic construct
  source 1..19: mol_type = other RNA
gacttgcaaagcttcactt

SEQ ID NO: 1637 - RNA, 19 nt, synthetic construct
  source 1..19: mol_type = other RNA
acttgcaaagcttcacttc

SEQ ID NO: 1638 - RNA, 19 nt, synthetic construct
  source 1..19: mol_type = other RNA
cttgcaaagcttcacttca

SEQ ID NO: 1639 - RNA, 19 nt, synthetic construct
  source 1..19: mol_type = other RNA
ttgcaaagcttcacttcat

SEQ ID NO: 1640 - RNA, 19 nt, synthetic construct
  source 1..19: mol_type = other RNA
tgcaaagcttcacttcatt

SEQ ID NO: 1641 - RNA, 19 nt, synthetic construct
  source 1..19: mol_type = other RNA
gcaaagcttcacttcattt

SEQ ID NO: 1642 - RNA, 19 nt, synthetic construct
  source 1..19: mol_type = other RNA
caaagcttcacttcatttt

SEQ ID NO: 1643 - RNA, 19 nt, synthetic construct
  source 1..19: mol_type = other RNA
aaagcttcacttcatttta

SEQ ID NO: 1644 - RNA, 19 nt, synthetic construct
  source 1..19: mol_type = other RNA
aagcttcacttcattttaa

SEQ ID NO: 1645 - RNA, 19 nt, synthetic construct
  source 1..19: mol_type = other RNA
agcttcacttcattttaag

SEQ ID NO: 1646 - RNA, 19 nt, synthetic construct
  source 1..19: mol_type = other RNA
gcttcacttcattttaaga

SEQ ID NO: 1647 - RNA, 19 nt, synthetic construct
  source 1..19: mol_type = other RNA
cttcacttcattttaagag

SEQ ID NO: 1648 - RNA, 19 nt, synthetic construct
  source 1..19: mol_type = other RNA
ttcacttcattttaagagc

SEQ ID NO: 1649 - RNA, 19 nt, synthetic construct
  source 1..19: mol_type = other RNA
tcacttcattttaagagca

SEQ ID NO: 1650 - RNA, 19 nt, synthetic construct
  source 1..19: mol_type = other RNA
cacttcattttaagagcaa

SEQ ID NO: 1651 - RNA, 19 nt, synthetic construct
  source 1..19: mol_type = other RNA
acttcattttaagagcaaa

SEQ ID NO: 1652 - RNA, 19 nt, synthetic construct
  source 1..19: mol_type = other RNA
cttcattttaagagcaaaa

SEQ ID NO: 1653 - RNA, 19 nt, synthetic construct
  source 1..19: mol_type = other RNA
ttcattttaagagcaaaag

SEQ ID NO: 1654 - RNA, 19 nt, synthetic construct
  source 1..19: mol_type = other RNA
tcattttaagagcaaaaga

SEQ ID NO: 1655 - RNA, 19 nt, synthetic construct
  source 1..19: mol_type = other RNA
cattttaagagcaaaagac

SEQ ID NO: 1656 - RNA, 19 nt, synthetic construct
  source 1..19: mol_type = other RNA
attttaagagcaaaagacc

SEQ ID NO: 1657 - RNA, 19 nt, synthetic construct
  source 1..19: mol_type = other RNA
ttttaagagcaaaagaccc

SEQ ID NO: 1658 - RNA, 19 nt, synthetic construct
  source 1..19: mol_type = other RNA
tttaagagcaaaagacccc

SEQ ID NO: 1659 - RNA, 19 nt, synthetic construct
  source 1..19: mol_type = other RNA
ttaagagcaaaagacccca

SEQ ID NO: 1660 - RNA, 19 nt, synthetic construct
  source 1..19: mol_type = other RNA
taagagcaaaagaccccat

SEQ ID NO: 1661 - RNA, 19 nt, synthetic construct
  source 1..19: mol_type = other RNA
aagagcaaaagaccccatg

SEQ ID NO: 1662 - RNA, 19 nt, synthetic construct
  source 1..19: mol_type = other RNA
agagcaaaagaccccatgt

SEQ ID NO: 1663 - RNA, 19 nt, synthetic construct
  source 1..19: mol_type = other RNA
gagcaaaagaccccatgtt

SEQ ID NO: 1664 - RNA, 19 nt, synthetic construct
  source 1..19: mol_type = other RNA
agcaaaagaccccatgttg

SEQ ID NO: 1665 - RNA, 19 nt, synthetic construct
  source 1..19: mol_type = other RNA
gcaaaagaccccatgttga

SEQ ID NO: 1666 - RNA, 19 nt, synthetic construct
  source 1..19: mol_type = other RNA
caaaagaccccatgttgaa

SEQ ID NO: 1667 - RNA, 19 nt, synthetic construct
  source 1..19: mol_type = other RNA
aaaagaccccatgttgaaa

SEQ ID NO: 1668 - RNA, 19 nt, synthetic construct
  source 1..19: mol_type = other RNA
aaagaccccatgttgaaaa

SEQ ID NO: 1669 - RNA, 19 nt, synthetic construct
  source 1..19: mol_type = other RNA
aagaccccatgttgaaaac

SEQ ID NO: 1670 - RNA, 19 nt, synthetic construct
  source 1..19: mol_type = other RNA
agaccccatgttgaaaact

SEQ ID NO: 1671 - RNA, 19 nt, synthetic construct
  source 1..19: mol_type = other RNA
gaccccatgttgaaaactc

SEQ ID NO: 1672 - RNA, 19 nt, synthetic construct
  source 1..19: mol_type = other RNA
accccatgttgaaaactcc

SEQ ID NO: 1673 - RNA, 19 nt, synthetic construct
  source 1..19: mol_type = other RNA
ccccatgttgaaaactcca

SEQ ID NO: 1674 - RNA, 19 nt, synthetic construct
  source 1..19: mol_type = other RNA
cccatgttgaaaactccat

SEQ ID NO: 1675 - RNA, 19 nt, synthetic construct
  source 1..19: mol_type = other RNA
ccatgttgaaaactccata

SEQ ID NO: 1676 - RNA, 19 nt, synthetic construct
  source 1..19: mol_type = other RNA
catgttgaaaactccataa

SEQ ID NO: 1677 - RNA, 19 nt, synthetic construct
  source 1..19: mol_type = other RNA
atgttgaaaactccataac

SEQ ID NO: 1678 - RNA, 19 nt, synthetic construct
  source 1..19: mol_type = other RNA
tgttgaaaactccataaca

SEQ ID NO: 1679 - RNA, 19 nt, synthetic construct
  source 1..19: mol_type = other RNA
gttgaaaactccataacag

SEQ ID NO: 1680 - RNA, 19 nt, synthetic construct
  source 1..19: mol_type = other RNA
ttgaaaactccataacagt

SEQ ID NO: 1681 - RNA, 19 nt, synthetic construct
  source 1..19: mol_type = other RNA
tgaaaactccataacagtt

SEQ ID NO: 1682 - RNA, 19 nt, synthetic construct
  source 1..19: mol_type = other RNA
gaaaactccataacagttt

SEQ ID NO: 1683 - RNA, 19 nt, synthetic construct
  source 1..19: mol_type = other RNA
aaaactccataacagtttt

SEQ ID NO: 1684 - RNA, 19 nt, synthetic construct
  source 1..19: mol_type = other RNA
aaactccataacagtttta

SEQ ID NO: 1685 - RNA, 19 nt, synthetic construct
  source 1..19: mol_type = other RNA
aactccataacagttttat

SEQ ID NO: 1686 - RNA, 19 nt, synthetic construct
  source 1..19: mol_type = other RNA
actccataacagttttatg

SEQ ID NO: 1687 - RNA, 19 nt, synthetic construct
  source 1..19: mol_type = other RNA
ctccataacagttttatgc

SEQ ID NO: 1688 - RNA, 19 nt, synthetic construct
  source 1..19: mol_type = other RNA
tccataacagttttatgct

SEQ ID NO: 1689 - RNA, 19 nt, synthetic construct
  source 1..19: mol_type = other RNA
ccataacagttttatgctg

SEQ ID NO: 1690 - RNA, 19 nt, synthetic construct
  source 1..19: mol_type = other RNA
cataacagttttatgctga

SEQ ID NO: 1691 - RNA, 19 nt, synthetic construct
  source 1..19: mol_type = other RNA
ataacagttttatgctgat

SEQ ID NO: 1692 - RNA, 19 nt, synthetic construct
  source 1..19: mol_type = other RNA
taacagttttatgctgatg

SEQ ID NO: 1693 - RNA, 19 nt, synthetic construct
  source 1..19: mol_type = other RNA
aacagttttatgctgatga

SEQ ID NO: 1694 - RNA, 19 nt, synthetic construct
  source 1..19: mol_type = other RNA
acagttttatgctgatgat

SEQ ID NO: 1695 - RNA, 19 nt, synthetic construct
  source 1..19: mol_type = other RNA
cagttttatgctgatgata

SEQ ID NO: 1696 - RNA, 19 nt, synthetic construct
  source 1..19: mol_type = other RNA
agttttatgctgatgataa

SEQ ID NO: 1697 - RNA, 19 nt, synthetic construct
  source 1..19: mol_type = other RNA
gttttatgctgatgataat

SEQ ID NO: 1698 - RNA, 19 nt, synthetic construct
  source 1..19: mol_type = other RNA
ttttatgctgatgataatt

SEQ ID NO: 1699 - RNA, 19 nt, synthetic construct
  source 1..19: mol_type = other RNA
tttatgctgatgataattt

SEQ ID NO: 1700 - RNA, 19 nt, synthetic construct
  source 1..19: mol_type = other RNA
ttatgctgatgataattta

SEQ ID NO: 1701 - RNA, 19 nt, synthetic construct
  source 1..19: mol_type = other RNA
tatgctgatgataatttat

SEQ ID NO: 1702 - RNA, 19 nt, synthetic construct
  source 1..19: mol_type = other RNA
atgctgatgataatttatc

SEQ ID NO: 1703 - RNA, 19 nt, synthetic construct
  source 1..19: mol_type = other RNA
tgctgatgataatttatct

SEQ ID NO: 1704 - RNA, 19 nt, synthetic construct
  source 1..19: mol_type = other RNA
gctgatgataatttatcta

SEQ ID NO: 1705 - RNA, 19 nt, synthetic construct
  source 1..19: mol_type = other RNA
ctgatgataatttatctac

SEQ ID NO: 1706 - RNA, 19 nt, synthetic construct
  source 1..19: mol_type = other RNA
tgatgataatttatctaca

SEQ ID NO: 1707 - RNA, 19 nt, synthetic construct
  source 1..19: mol_type = other RNA
gatgataatttatctacat

SEQ ID NO: 1708 - RNA, 19 nt, synthetic construct
  source 1..19: mol_type = other RNA
atgataatttatctacatg

SEQ ID NO: 1709 - RNA, 19 nt, synthetic construct
  source 1..19: mol_type = other RNA
tgataatttatctacatgc

SEQ ID NO: 1710 - RNA, 19 nt, synthetic construct
  source 1..19: mol_type = other RNA
gataatttatctacatgca

SEQ ID NO: 1711 - RNA, 19 nt, synthetic construct
  source 1..19: mol_type = other RNA
ataatttatctacatgcat

SEQ ID NO: 1712 - RNA, 19 nt, synthetic construct
  source 1..19: mol_type = other RNA
taatttatctacatgcatt

SEQ ID NO: 1713 - RNA, 19 nt, synthetic construct
  source 1..19: mol_type = other RNA
aatttatctacatgcattt

SEQ ID NO: 1714 - RNA, 19 nt, synthetic construct
  source 1..19: mol_type = other RNA
atttatctacatgcatttc

SEQ ID NO: 1715 - RNA, 19 nt, synthetic construct
  source 1..19: mol_type = other RNA
tttatctacatgcatttca

SEQ ID NO: 1716 - RNA, 19 nt, synthetic construct
  source 1..19: mol_type = other RNA
ttatctacatgcatttcaa

SEQ ID NO: 1717 - RNA, 19 nt, synthetic construct
  source 1..19: mol_type = other RNA
tatctacatgcatttcaat

SEQ ID NO: 1718 - RNA, 19 nt, synthetic construct
  source 1..19: mol_type = other RNA
atctacatgcatttcaata

SEQ ID NO: 1719 - RNA, 19 nt, synthetic construct
  source 1..19: mol_type = other RNA
tctacatgcatttcaataa

SEQ ID NO: 1720 - RNA, 19 nt, synthetic construct
  source 1..19: mol_type = other RNA
ctacatgcatttcaataaa

SEQ ID NO: 1721 - RNA, 19 nt, synthetic construct
  source 1..19: mol_type = other RNA
tacatgcatttcaataaac

SEQ ID NO: 1722 - RNA, 19 nt, synthetic construct
  source 1..19: mol_type = other RNA
acatgcatttcaataaacc

SEQ ID NO: 1723 - RNA, 19 nt, synthetic construct
  source 1..19: mol_type = other RNA
catgcatttcaataaacct

SEQ ID NO: 1724 - RNA, 19 nt, synthetic construct
  source 1..19: mol_type = other RNA
atgcatttcaataaacctt

SEQ ID NO: 1725 - RNA, 19 nt, synthetic construct
  source 1..19: mol_type = other RNA
tgcatttcaataaaccttt

SEQ ID NO: 1726 - RNA, 19 nt, synthetic construct
  source 1..19: mol_type = other RNA
gcatttcaataaacctttt

SEQ ID NO: 1727 - RNA, 19 nt, synthetic construct
  source 1..19: mol_type = other RNA
catttcaataaaccttttg

SEQ ID NO: 1728 - RNA, 19 nt, synthetic construct
  source 1..19: mol_type = other RNA
atttcaataaaccttttgt

SEQ ID NO: 1729 - RNA, 19 nt, synthetic construct
  source 1..19: mol_type = other RNA
tttcaataaaccttttgtt

SEQ ID NO: 1730 - RNA, 19 nt, synthetic construct
  source 1..19: mol_type = other RNA
ttcaataaaccttttgttt

SEQ ID NO: 1731 - RNA, 19 nt, synthetic construct
  source 1..19: mol_type = other RNA
tcaataaaccttttgtttc

SEQ ID NO: 1732 - RNA, 19 nt, synthetic construct
  source 1..19: mol_type = other RNA
caataaaccttttgtttcc

SEQ ID NO: 1733 - RNA, 19 nt, synthetic construct
  source 1..19: mol_type = other RNA
aataaaccttttgtttcct

SEQ ID NO: 1734 - RNA, 19 nt, synthetic construct
  source 1..19: mol_type = other RNA
ataaaccttttgtttccta

SEQ ID NO: 1735 - RNA, 19 nt, synthetic construct
  source 1..19: mol_type = other RNA
taaaccttttgtttcctaa

SEQ ID NO: 1736 - RNA, 19 nt, synthetic construct
  source 1..19: mol_type = other RNA
aaaccttttgtttcctaag

SEQ ID NO: 1737 - RNA, 19 nt, synthetic construct
  source 1..19: mol_type = other RNA
aaccttttgtttcctaaga

SEQ ID NO: 1738 - RNA, 19 nt, synthetic construct
  source 1..19: mol_type = other RNA
accttttgtttcctaagac

SEQ ID NO: 1739 - RNA, 19 nt, synthetic construct
  source 1..19: mol_type = other RNA
ccttttgtttcctaagact

SEQ ID NO: 1740 - RNA, 19 nt, synthetic construct
  source 1..19: mol_type = other RNA
cttttgtttcctaagacta

SEQ ID NO: 1741 - RNA, 19 nt, synthetic construct
  source 1..19: mol_type = other RNA
ttttgtttcctaagactag

SEQ ID NO: 1742 - RNA, 19 nt, synthetic construct
  source 1..19: mol_type = other RNA
tttgtttcctaagactaga

SEQ ID NO: 1743 - RNA, 19 nt, synthetic construct
  source 1..19: mol_type = other RNA
gttgaagctcctccttttt

SEQ ID NO: 1744 - RNA, 19 nt, synthetic construct
  source 1..19: mol_type = other RNA
ggttgaagctcctcctttt

SEQ ID NO: 1745 - RNA, 19 nt, synthetic construct
  source 1..19: mol_type = other RNA
aggttgaagctcctccttt

SEQ ID NO: 1746 - RNA, 19 nt, synthetic construct
  source 1..19: mol_type = other RNA
caggttgaagctcctcctt

SEQ ID NO: 1747 - RNA, 19 nt, synthetic construct
  source 1..19: mol_type = other RNA
acaggttgaagctcctcct

SEQ ID NO: 1748 - RNA, 19 nt, synthetic construct
  source 1..19: mol_type = other RNA
cacaggttgaagctcctcc

SEQ ID NO: 1749 - RNA, 19 nt, synthetic construct
  source 1..19: mol_type = other RNA
acacaggttgaagctcctc

SEQ ID NO: 1750 - RNA, 19 nt, synthetic construct
  source 1..19: mol_type = other RNA
cacacaggttgaagctcct

SEQ ID NO: 1751 - RNA, 19 nt, synthetic construct
  source 1..19: mol_type = other RNA
gcacacaggttgaagctcc

SEQ ID NO: 1752 - RNA, 19 nt, synthetic construct
  source 1..19: mol_type = other RNA
tgcacacaggttgaagctc

SEQ ID NO: 1753 - RNA, 19 nt, synthetic construct
  source 1..19: mol_type = other RNA
ttgcacacaggttgaagct

SEQ ID NO: 1754 - RNA, 19 nt, synthetic construct
  source 1..19: mol_type = other RNA
tttgcacacaggttgaagc

SEQ ID NO: 1755 - RNA, 19 nt, synthetic construct
  source 1..19: mol_type = other RNA
ttttgcacacaggttgaag

SEQ ID NO: 1756 - RNA, 19 nt, synthetic construct
  source 1..19: mol_type = other RNA
attttgcacacaggttgaa

SEQ ID NO: 1757 - RNA, 19 nt, synthetic construct
  source 1..19: mol_type = other RNA
gattttgcacacaggttga

SEQ ID NO: 1758 - RNA, 19 nt, synthetic construct
  source 1..19: mol_type = other RNA
agattttgcacacaggttg

SEQ ID NO: 1759 - RNA, 19 nt, synthetic construct
  source 1..19: mol_type = other RNA
cagattttgcacacaggtt

SEQ ID NO: 1760 - RNA, 19 nt, synthetic construct
  source 1..19: mol_type = other RNA
ccagattttgcacacaggt

SEQ ID NO: 1761 - RNA, 19 nt, synthetic construct
  source 1..19: mol_type = other RNA
cccagattttgcacacagg

SEQ ID NO: 1762 - RNA, 19 nt, synthetic construct
  source 1..19: mol_type = other RNA
tcccagattttgcacacag

SEQ ID NO: 1763 - RNA, 19 nt, synthetic construct
  source 1..19: mol_type = other RNA
ttcccagattttgcacaca

SEQ ID NO: 1764 - RNA, 19 nt, synthetic construct
  source 1..19: mol_type = other RNA
gttcccagattttgcacac

SEQ ID NO: 1765 - RNA, 19 nt, synthetic construct
  source 1..19: mol_type = other RNA
ggttcccagattttgcaca

SEQ ID NO: 1766 - RNA, 19 nt, synthetic construct
  source 1..19: mol_type = other RNA
aggttcccagattttgcac

SEQ ID NO: 1767 - RNA, 19 nt, synthetic construct
  source 1..19: mol_type = other RNA
caggttcccagattttgca

SEQ ID NO: 1768 - RNA, 19 nt, synthetic construct
  source 1..19: mol_type = other RNA
tcaggttcccagattttgc

SEQ ID NO: 1769 - RNA, 19 nt, synthetic construct
  source 1..19: mol_type = other RNA
gtcaggttcccagattttg

SEQ ID NO: 1770 - RNA, 19 nt, synthetic construct
  source 1..19: mol_type = other RNA
tgtcaggttcccagatttt

SEQ ID NO: 1771 - RNA, 19 nt, synthetic construct
  source 1..19: mol_type = other RNA
ctgtcaggttcccagattt

SEQ ID NO: 1772 - RNA, 19 nt, synthetic construct
  source 1..19: mol_type = other RNA
actgtcaggttcccagatt

SEQ ID NO: 1773 - RNA, 19 nt, synthetic construct
  source 1..19: mol_type = other RNA
tactgtcaggttcccagat

SEQ ID NO: 1774 - RNA, 19 nt, synthetic construct
  source 1..19: mol_type = other RNA
atactgtcaggttcccaga

SEQ ID NO: 1775 - RNA, 19 nt, synthetic construct
  source 1..19: mol_type = other RNA
tatactgtcaggttcccag

SEQ ID NO: 1776 - RNA, 19 nt, synthetic construct
  source 1..19: mol_type = other RNA
ctatactgtcaggttccca

SEQ ID NO: 1777 - RNA, 19 nt, synthetic construct
  source 1..19: mol_type = other RNA
cctatactgtcaggttccc

SEQ ID NO: 1778 - RNA, 19 nt, synthetic construct
  source 1..19: mol_type = other RNA
acctatactgtcaggttcc

SEQ ID NO: 1779 - RNA, 19 nt, synthetic construct
  source 1..19: mol_type = other RNA
aacctatactgtcaggttc

SEQ ID NO: 1780 - RNA, 19 nt, synthetic construct
  source 1..19: mol_type = other RNA
caacctatactgtcaggtt

SEQ ID NO: 1781 - RNA, 19 nt, synthetic construct
  source 1..19: mol_type = other RNA
ccaacctatactgtcaggt

SEQ ID NO: 1782 - RNA, 19 nt, synthetic construct
  source 1..19: mol_type = other RNA
cccaacctatactgtcagg

SEQ ID NO: 1783 - RNA, 19 nt, synthetic construct
  source 1..19: mol_type = other RNA
ccccaacctatactgtcag

SEQ ID NO: 1784 - RNA, 19 nt, synthetic construct
  source 1..19: mol_type = other RNA
cccccaacctatactgtca

SEQ ID NO: 1785 - RNA, 19 nt, synthetic construct
  source 1..19: mol_type = other RNA
gcccccaacctatactgtc

SEQ ID NO: 1786 - RNA, 19 nt, synthetic construct
  source 1..19: mol_type = other RNA
ggcccccaacctatactgt

SEQ ID NO: 1787 - RNA, 19 nt, synthetic construct
  source 1..19: mol_type = other RNA
tggcccccaacctatactg

SEQ ID NO: 1788 - RNA, 19 nt, synthetic construct
  source 1..19: mol_type = other RNA
ctggcccccaacctatact

SEQ ID NO: 1789 - RNA, 19 nt, synthetic construct
  source 1..19: mol_type = other RNA
cctggcccccaacctatac

SEQ ID NO: 1790 - RNA, 19 nt, synthetic construct
  source 1..19: mol_type = other RNA
tcctggcccccaacctata

SEQ ID NO: 1791 - RNA, 19 nt, synthetic construct
  source 1..19: mol_type = other RNA
atcctggcccccaacctat

SEQ ID NO: 1792 - RNA, 19 nt, synthetic construct
  source 1..19: mol_type = other RNA
catcctggcccccaaccta

SEQ ID NO: 1793 - RNA, 19 nt, synthetic construct
  source 1..19: mol_type = other RNA
tcatcctggcccccaacct

SEQ ID NO: 1794 - RNA, 19 nt, synthetic construct
  source 1..19: mol_type = other RNA
ctcatcctggcccccaacc

SEQ ID NO: 1795 - RNA, 19 nt, synthetic construct
  source 1..19: mol_type = other RNA
cctcatcctggcccccaac

SEQ ID NO: 1796 - RNA, 19 nt, synthetic construct
  source 1..19: mol_type = other RNA
tcctcatcctggcccccaa

SEQ ID NO: 1797 - RNA, 19 nt, synthetic construct
  source 1..19: mol_type = other RNA
ttcctcatcctggccccca

SEQ ID NO: 1798 - RNA, 19 nt, synthetic construct
  source 1..19: mol_type = other RNA
tttcctcatcctggccccc

SEQ ID NO: 1799 - RNA, 19 nt, synthetic construct
  source 1..19: mol_type = other RNA
ttttcctcatcctggcccc

SEQ ID NO: 1800 - RNA, 19 nt, synthetic construct
  source 1..19: mol_type = other RNA
tttttcctcatcctggccc

SEQ ID NO: 1801 - RNA, 19 nt, synthetic construct
  source 1..19: mol_type = other RNA
ctttttcctcatcctggcc

SEQ ID NO: 1802 - RNA, 19 nt, synthetic construct
  source 1..19: mol_type = other RNA
cctttttcctcatcctggc

SEQ ID NO: 1803 - RNA, 19 nt, synthetic construct
  source 1..19: mol_type = other RNA
tcctttttcctcatcctgg

SEQ ID NO: 1804 - RNA, 19 nt, synthetic construct
  source 1..19: mol_type = other RNA
ttcctttttcctcatcctg

SEQ ID NO: 1805 - RNA, 19 nt, synthetic construct
  source 1..19: mol_type = other RNA
gttcctttttcctcatcct

SEQ ID NO: 1806 - RNA, 19 nt, synthetic construct
  source 1..19: mol_type = other RNA
cgttcctttttcctcatcc

SEQ ID NO: 1807 - RNA, 19 nt, synthetic construct
  source 1..19: mol_type = other RNA
ccgttcctttttcctcatc

SEQ ID NO: 1808 - RNA, 19 nt, synthetic construct
  source 1..19: mol_type = other RNA
cccgttcctttttcctcat

SEQ ID NO: 1809 - RNA, 19 nt, synthetic construct
  source 1..19: mol_type = other RNA
tcccgttcctttttcctca

SEQ ID NO: 1810 - RNA, 19 nt, synthetic construct
  source 1..19: mol_type = other RNA
ttcccgttcctttttcctc

SEQ ID NO: 1811 - RNA, 19 nt, synthetic construct
  source 1..19: mol_type = other RNA
tttcccgttcctttttcct

SEQ ID NO: 1812 - RNA, 19 nt, synthetic construct
  source 1..19: mol_type = other RNA
ctttcccgttcctttttcc

SEQ ID NO: 1813 - RNA, 19 nt, synthetic construct
  source 1..19: mol_type = other RNA
tctttcccgttcctttttc

SEQ ID NO: 1814 - RNA, 19 nt, synthetic construct
  source 1..19: mol_type = other RNA
gtctttcccgttccttttt

SEQ ID NO: 1815 - RNA, 19 nt, synthetic construct
  source 1..19: mol_type = other RNA
ggtctttcccgttcctttt

SEQ ID NO: 1816 - RNA, 19 nt, synthetic construct
  source 1..19: mol_type = other RNA
aggtctttcccgttccttt

SEQ ID NO: 1817 - RNA, 19 nt, synthetic construct
  source 1..19: mol_type = other RNA
caggtctttcccgttcctt

SEQ ID NO: 1818 - RNA, 19 nt, synthetic construct
  source 1..19: mol_type = other RNA
gcaggtctttcccgttcct

SEQ ID NO: 1819 - RNA, 19 nt, synthetic construct
  source 1..19: mol_type = other RNA
ggcaggtctttcccgttcc

SEQ ID NO: 1820 - RNA, 19 nt, synthetic construct
  source 1..19: mol_type = other RNA
gggcaggtctttcccgttc

SEQ ID NO: 1821 - RNA, 19 nt, synthetic construct
  source 1..19: mol_type = other RNA
tgggcaggtctttcccgtt

SEQ ID NO: 1822 - RNA, 19 nt, synthetic construct
  source 1..19: mol_type = other RNA
gtgggcaggtctttcccgt

SEQ ID NO: 1823 - RNA, 19 nt, synthetic construct
  source 1..19: mol_type = other RNA
ggtgggcaggtctttcccg

SEQ ID NO: 1824 - RNA, 19 nt, synthetic construct
  source 1..19: mol_type = other RNA
gggtgggcaggtctttccc

SEQ ID NO: 1825 - RNA, 19 nt, synthetic construct
  source 1..19: mol_type = other RNA
agggtgggcaggtctttcc

SEQ ID NO: 1826 - RNA, 19 nt, synthetic construct
  source 1..19: mol_type = other RNA
aagggtgggcaggtctttc

SEQ ID NO: 1827 - RNA, 19 nt, synthetic construct
  source 1..19: mol_type = other RNA
gaagggtgggcaggtcttt

SEQ ID NO: 1828 - RNA, 19 nt, synthetic construct
  source 1..19: mol_type = other RNA
agaagggtgggcaggtctt

SEQ ID NO: 1829 - RNA, 19 nt, synthetic construct
  source 1..19: mol_type = other RNA
cagaagggtgggcaggtct

SEQ ID NO: 1830 - RNA, 19 nt, synthetic construct
  source 1..19: mol_type = other RNA
ccagaagggtgggcaggtc

SEQ ID NO: 1831 - RNA, 19 nt, synthetic construct
  source 1..19: mol_type = other RNA
accagaagggtgggcaggt

SEQ ID NO: 1832 - RNA, 19 nt, synthetic construct
  source 1..19: mol_type = other RNA
taccagaagggtgggcagg

SEQ ID NO: 1833 - RNA, 19 nt, synthetic construct
  source 1..19: mol_type = other RNA
ttaccagaagggtgggcag

SEQ ID NO: 1834 - RNA, 19 nt, synthetic construct
  source 1..19: mol_type = other RNA
cttaccagaagggtgggca

SEQ ID NO: 1835 - RNA, 19 nt, synthetic construct
  source 1..19: mol_type = other RNA
ccttaccagaagggtgggc

SEQ ID NO: 1836 - RNA, 19 nt, synthetic construct
  source 1..19: mol_type = other RNA
tccttaccagaagggtggg

SEQ ID NO: 1837 - RNA, 19 nt, synthetic construct
  source 1..19: mol_type = other RNA
ctccttaccagaagggtgg

SEQ ID NO: 1838 - RNA, 19 nt, synthetic construct
  source 1..19: mol_type = other RNA
cctccttaccagaagggtg

SEQ ID NO: 1839 - RNA, 19 nt, synthetic construct
  source 1..19: mol_type = other RNA
gcctccttaccagaagggt

SEQ ID NO: 1840 - DNA, 19 bp, synthetic construct
  source 1..19: mol_type = other DNA
ggcctccttaccagaaggg

SEQ ID NO: 1841 - RNA, 19 nt, synthetic construct
  source 1..19: mol_type = other RNA
gggcctccttaccagaagg

SEQ ID NO: 1842 - RNA, 19 nt, synthetic construct
  source 1..19: mol_type = other RNA
ggggcctccttaccagaag

SEQ ID NO: 1843 - RNA, 19 nt, synthetic construct
  source 1..19: mol_type = other RNA
cggggcctccttaccagaa

SEQ ID NO: 1844 - RNA, 19 nt, synthetic construct
  source 1..19: mol_type = other RNA
acggggcctccttaccaga

SEQ ID NO: 1845 - RNA, 19 nt, synthetic construct
  source 1..19: mol_type = other RNA
cacggggcctccttaccag

SEQ ID NO: 1846 - RNA, 19 nt, synthetic construct
  source 1..19: mol_type = other RNA
tcacggggcctccttacca

SEQ ID NO: 1847 - RNA, 19 nt, synthetic construct
  source 1..19: mol_type = other RNA
atcacggggcctccttacc

SEQ ID NO: 1848 - RNA, 19 nt, synthetic construct
  source 1..19: mol_type = other RNA
gatcacggggcctccttac

SEQ ID NO: 1849 - RNA, 19 nt, synthetic construct
  source 1..19: mol_type = other RNA
tgatcacggggcctcctta

SEQ ID NO: 1850 - RNA, 19 nt, synthetic construct
  source 1..19: mol_type = other RNA
ctgatcacggggcctcctt

SEQ ID NO: 1851 - RNA, 19 nt, synthetic construct
  source 1..19: mol_type = other RNA
gctgatcacggggcctcct

SEQ ID NO: 1852 - RNA, 19 nt, synthetic construct
  source 1..19: mol_type = other RNA
agctgatcacggggcctcc

SEQ ID NO: 1853 - RNA, 19 nt, synthetic construct
  source 1..19: mol_type = other RNA
gagctgatcacggggcctc

SEQ ID NO: 1854 - RNA, 19 nt, synthetic construct
  source 1..19: mol_type = other RNA
ggagctgatcacggggcct

SEQ ID NO: 1855 - RNA, 19 nt, synthetic construct
  source 1..19: mol_type = other RNA
tggagctgatcacggggcc

SEQ ID NO: 1856 - RNA, 19 nt, synthetic construct
  source 1..19: mol_type = other RNA
ctggagctgatcacggggc

SEQ ID NO: 1857 - RNA, 19 nt, synthetic construct
  source 1..19: mol_type = other RNA
gctggagctgatcacgggg

SEQ ID NO: 1858 - RNA, 19 nt, synthetic construct
  source 1..19: mol_type = other RNA
ggctggagctgatcacggg

SEQ ID NO: 1859 - RNA, 19 nt, synthetic construct
  source 1..19: mol_type = other RNA
tggctggagctgatcacgg

SEQ ID NO: 1860 - RNA, 19 nt, synthetic construct
  source 1..19: mol_type = other RNA
atggctggagctgatcacg

SEQ ID NO: 1861 - RNA, 19 nt, synthetic construct
  source 1..19: mol_type = other RNA
aatggctggagctgatcac

SEQ ID NO: 1862 - RNA, 19 nt, synthetic construct
  source 1..19: mol_type = other RNA
aaatggctggagctgatca

SEQ ID NO: 1863 - RNA, 19 nt, synthetic construct
  source 1..19: mol_type = other RNA
caaatggctggagctgatc

SEQ ID NO: 1864 - RNA, 19 nt, synthetic construct
  source 1..19: mol_type = other RNA
gcaaatggctggagctgat

SEQ ID NO: 1865 - RNA, 19 nt, synthetic construct
  source 1..19: mol_type = other RNA
tgcaaatggctggagctga

SEQ ID NO: 1866 - RNA, 19 nt, synthetic construct
  source 1..19: mol_type = other RNA
ctgcaaatggctggagctg

SEQ ID NO: 1867 - RNA, 19 nt, synthetic construct
  source 1..19: mol_type = other RNA
actgcaaatggctggagct

SEQ ID NO: 1868 - RNA, 19 nt, synthetic construct
  source 1..19: mol_type = other RNA
gactgcaaatggctggagc

SEQ ID NO: 1869 - RNA, 19 nt, synthetic construct
  source 1..19: mol_type = other RNA
ggactgcaaatggctggag

SEQ ID NO: 1870 - RNA, 19 nt, synthetic construct
  source 1..19: mol_type = other RNA
aggactgcaaatggctgga

SEQ ID NO: 1871 - RNA, 19 nt, synthetic construct
  source 1..19: mol_type = other RNA
caggactgcaaatggctgg

SEQ ID NO: 1872 - RNA, 19 nt, synthetic construct
  source 1..19: mol_type = other RNA
ccaggactgcaaatggctg

SEQ ID NO: 1873 - RNA, 19 nt, synthetic construct
  source 1..19: mol_type = other RNA
gccaggactgcaaatggct

SEQ ID NO: 1874 - RNA, 19 nt, synthetic construct
  source 1..19: mol_type = other RNA
agccaggactgcaaatggc

SEQ ID NO: 1875 - RNA, 19 nt, synthetic construct
  source 1..19: mol_type = other RNA
tagccaggactgcaaatgg

SEQ ID NO: 1876 - RNA, 19 nt, synthetic construct
  source 1..19: mol_type = other RNA
atagccaggactgcaaatg

SEQ ID NO: 1877 - RNA, 19 nt, synthetic construct
  source 1..19: mol_type = other RNA
gatagccaggactgcaaat

SEQ ID NO: 1878 - RNA, 19 nt, synthetic construct
  source 1..19: mol_type = other RNA
ggatagccaggactgcaaa

SEQ ID NO: 1879 - RNA, 19 nt, synthetic construct
  source 1..19: mol_type = other RNA
gggatagccaggactgcaa

SEQ ID NO: 1880 - RNA, 19 nt, synthetic construct
  source 1..19: mol_type = other RNA
tgggatagccaggactgca

SEQ ID NO: 1881 - RNA, 19 nt, synthetic construct
  source 1..19: mol_type = other RNA
ctgggatagccaggactgc

SEQ ID NO: 1882 - RNA, 19 nt, synthetic construct
  source 1..19: mol_type = other RNA
cctgggatagccaggactg

SEQ ID NO: 1883 - RNA, 19 nt, synthetic construct
  source 1..19: mol_type = other RNA
tcctgggatagccaggact

SEQ ID NO: 1884 - RNA, 19 nt, synthetic construct
  source 1..19: mol_type = other RNA
ctcctgggatagccaggac

SEQ ID NO: 1885 - RNA, 19 nt, synthetic construct
  source 1..19: mol_type = other RNA
gctcctgggatagccagga

SEQ ID NO: 1886 - RNA, 19 nt, synthetic construct
  source 1..19: mol_type = other RNA
agctcctgggatagccagg

SEQ ID NO: 1887 - RNA, 19 nt, synthetic construct
  source 1..19: mol_type = other RNA
aagctcctgggatagccag

SEQ ID NO: 1888 - RNA, 19 nt, synthetic construct
  source 1..19: mol_type = other RNA
taagctcctgggatagcca

SEQ ID NO: 1889 - RNA, 19 nt, synthetic construct
  source 1..19: mol_type = other RNA
gtaagctcctgggatagcc

SEQ ID NO: 1890 - RNA, 19 nt, synthetic construct
  source 1..19: mol_type = other RNA
tgtaagctcctgggatagc

SEQ ID NO: 1891 - RNA, 19 nt, synthetic construct
  source 1..19: mol_type = other RNA
atgtaagctcctgggatag

SEQ ID NO: 1892 - RNA, 19 nt, synthetic construct
  source 1..19: mol_type = other RNA
tatgtaagctcctgggata

SEQ ID NO: 1893 - RNA, 19 nt, synthetic construct
  source 1..19: mol_type = other RNA
ttatgtaagctcctgggat

SEQ ID NO: 1894 - RNA, 19 nt, synthetic construct
  source 1..19: mol_type = other RNA
tttatgtaagctcctggga

SEQ ID NO: 1895 - RNA, 19 nt, synthetic construct
  source 1..19: mol_type = other RNA
ctttatgtaagctcctggg

SEQ ID NO: 1896 - RNA, 19 nt, synthetic construct
  source 1..19: mol_type = other RNA
cctttatgtaagctcctgg

SEQ ID NO: 1897 - RNA, 19 nt, synthetic construct
  source 1..19: mol_type = other RNA
ccctttatgtaagctcctg

SEQ ID NO: 1898 - RNA, 19 nt, synthetic construct
  source 1..19: mol_type = other RNA
tccctttatgtaagctcct

SEQ ID NO: 1899 - RNA, 19 nt, synthetic construct
  source 1..19: mol_type = other RNA
gtccctttatgtaagctcc

SEQ ID NO: 1900 - RNA, 19 nt, synthetic construct
  source 1..19: mol_type = other RNA
tgtccctttatgtaagctc

SEQ ID NO: 1901 - RNA, 19 nt, synthetic construct
  source 1..19: mol_type = other RNA
ttgtccctttatgtaagct

SEQ ID NO: 1902 - RNA, 19 nt, synthetic construct
  source 1..19: mol_type = other RNA
attgtccctttatgtaagc

SEQ ID NO: 1903 - RNA, 19 nt, synthetic construct
  source 1..19: mol_type = other RNA
aattgtccctttatgtaag

SEQ ID NO: 1904 - RNA, 19 nt, synthetic construct
  source 1..19: mol_type = other RNA
caattgtccctttatgtaa

SEQ ID NO: 1905 - RNA, 19 nt, synthetic construct
  source 1..19: mol_type = other RNA
ccaattgtccctttatgta

SEQ ID NO: 1906 - RNA, 19 nt, synthetic construct
  source 1..19: mol_type = other RNA
tccaattgtccctttatgt

SEQ ID NO: 1907 - RNA, 19 nt, synthetic construct
  source 1..19: mol_type = other RNA
ctccaattgtccctttatg

SEQ ID NO: 1908 - RNA, 19 nt, synthetic construct
  source 1..19: mol_type = other RNA
gctccaattgtccctttat

SEQ ID NO: 1909 - RNA, 19 nt, synthetic construct
  source 1..19: mol_type = other RNA
ggctccaattgtcccttta

SEQ ID NO: 1910 - RNA, 19 nt, synthetic construct
  source 1..19: mol_type = other RNA
aggctccaattgtcccttt

SEQ ID NO: 1911 - RNA, 19 nt, synthetic construct
  source 1..19: mol_type = other RNA
caggctccaattgtccctt

SEQ ID NO: 1912 - RNA, 19 nt, synthetic construct
  source 1..19: mol_type = other RNA
tcaggctccaattgtccct

SEQ ID NO: 1913 - RNA, 19 nt, synthetic construct
  source 1..19: mol_type = other RNA
ctcaggctccaattgtccc

SEQ ID NO: 1914 - RNA, 19 nt, synthetic construct
  source 1..19: mol_type = other RNA
tctcaggctccaattgtcc

SEQ ID NO: 1915 - RNA, 19 nt, synthetic construct
  source 1..19: mol_type = other RNA
ctctcaggctccaattgtc

SEQ ID NO: 1916 - RNA, 19 nt, synthetic construct
  source 1..19: mol_type = other RNA
cctctcaggctccaattgt

SEQ ID NO: 1917 - RNA, 19 nt, synthetic construct
  source 1..19: mol_type = other RNA
acctctcaggctccaattg

SEQ ID NO: 1918 - RNA, 19 nt, synthetic construct
  source 1..19: mol_type = other RNA
cacctctcaggctccaatt

SEQ ID NO: 1919 - RNA, 19 nt, synthetic construct
  source 1..19: mol_type = other RNA
tcacctctcaggctccaat

SEQ ID NO: 1920 - RNA, 19 nt, synthetic construct
  source 1..19: mol_type = other RNA
gtcacctctcaggctccaa

SEQ ID NO: 1921 - RNA, 19 nt, synthetic construct
  source 1..19: mol_type = other RNA
tgtcacctctcaggctcca

SEQ ID NO: 1922 - RNA, 19 nt, synthetic construct
  source 1..19: mol_type = other RNA
ctgtcacctctcaggctcc

SEQ ID NO: 1923 - RNA, 19 nt, synthetic construct
  source 1..19: mol_type = other RNA
actgtcacctctcaggctc

SEQ ID NO: 1924 - RNA, 38 nt, synthetic construct
  source 1..38: mol_type = other RNA
cactgtcacctctcaggctcactgtcacctctcaggct

SEQ ID NO: 1925 - RNA, 19 nt, synthetic construct
  source 1..19: mol_type = other RNA
gcactgtcacctctcaggc

SEQ ID NO: 1926 - RNA, 19 nt, synthetic construct
  source 1..19: mol_type = other RNA
agcactgtcacctctcagg

SEQ ID NO: 1927 - RNA, 19 nt, synthetic construct
  source 1..19: mol_type = other RNA
cagcactgtcacctctcag

SEQ ID NO: 1928 - RNA, 19 nt, synthetic construct
  source 1..19: mol_type = other RNA
tcagcactgtcacctctca

SEQ ID NO: 1929 - RNA, 19 nt, synthetic construct
  source 1..19: mol_type = other RNA
gtcagcactgtcacctctc

SEQ ID NO: 1930 - RNA, 19 nt, synthetic construct
  source 1..19: mol_type = other RNA
tgtcagcactgtcacctct

SEQ ID NO: 1931 - RNA, 19 nt, synthetic construct
  source 1..19: mol_type = other RNA
gtgtcagcactgtcacctc

SEQ ID NO: 1932 - RNA, 19 nt, synthetic construct
  source 1..19: mol_type = other RNA
agtgtcagcactgtcacct

SEQ ID NO: 1933 - RNA, 19 nt, synthetic construct
  source 1..19: mol_type = other RNA
tagtgtcagcactgtcacc

SEQ ID NO: 1934 - RNA, 19 nt, synthetic construct
  source 1..19: mol_type = other RNA
gtagtgtcagcactgtcac

SEQ ID NO: 1935 - RNA, 19 nt, synthetic construct
  source 1..19: mol_type = other RNA
tgtagtgtcagcactgtca

SEQ ID NO: 1936 - RNA, 19 nt, synthetic construct
  source 1..19: mol_type = other RNA
ttgtagtgtcagcactgtc

SEQ ID NO: 1937 - RNA, 19 nt, synthetic construct
  source 1..19: mol_type = other RNA
cttgtagtgtcagcactgt

SEQ ID NO: 1938 - RNA, 19 nt, synthetic construct
  source 1..19: mol_type = other RNA
ccttgtagtgtcagcactg

SEQ ID NO: 1939 - RNA, 19 nt, synthetic construct
  source 1..19: mol_type = other RNA
gccttgtagtgtcagcact

SEQ ID NO: 1940 - RNA, 19 nt, synthetic construct
  source 1..19: mol_type = other RNA
agccttgtagtgtcagcac

SEQ ID NO: 1941 - RNA, 19 nt, synthetic construct
  source 1..19: mol_type = other RNA
gagccttgtagtgtcagca

SEQ ID NO: 1942 - RNA, 19 nt, synthetic construct
  source 1..19: mol_type = other RNA
cgagccttgtagtgtcagc

SEQ ID NO: 1943 - RNA, 19 nt, synthetic construct
  source 1..19: mol_type = other RNA
ccgagccttgtagtgtcag

SEQ ID NO: 1944 - RNA, 19 nt, synthetic construct
  source 1..19: mol_type = other RNA
tccgagccttgtagtgtca

SEQ ID NO: 1945 - RNA, 19 nt, synthetic construct
  source 1..19: mol_type = other RNA
ctccgagccttgtagtgtc

SEQ ID NO: 1946 - RNA, 19 nt, synthetic construct
  source 1..19: mol_type = other RNA
gctccgagccttgtagtgt

SEQ ID NO: 1947 - RNA, 19 nt, synthetic construct
  source 1..19: mol_type = other RNA
agctccgagccttgtagtg

SEQ ID NO: 1948 - RNA, 19 nt, synthetic construct
  source 1..19: mol_type = other RNA
gagctccgagccttgtagt

SEQ ID NO: 1949 - RNA, 19 nt, synthetic construct
  source 1..19: mol_type = other RNA
ggagctccgagccttgtag

SEQ ID NO: 1950 - RNA, 19 nt, synthetic construct
  source 1..19: mol_type = other RNA
cggagctccgagccttgta

SEQ ID NO: 1951 - RNA, 19 nt, synthetic construct
  source 1..19: mol_type = other RNA
ccggagctccgagccttgt

SEQ ID NO: 1952 - RNA, 19 nt, synthetic construct
  source 1..19: mol_type = other RNA
cccggagctccgagccttg

SEQ ID NO: 1953 - RNA, 19 nt, synthetic construct
  source 1..19: mol_type = other RNA
gcccggagctccgagcctt

SEQ ID NO: 1954 - RNA, 19 nt, synthetic construct
  source 1..19: mol_type = other RNA
tgcccggagctccgagcct

SEQ ID NO: 1955 - RNA, 19 nt, synthetic construct
  source 1..19: mol_type = other RNA
gtgcccggagctccgagcc

SEQ ID NO: 1956 - RNA, 19 nt, synthetic construct
  source 1..19: mol_type = other RNA
agtgcccggagctccgagc

SEQ ID NO: 1957 - RNA, 19 nt, synthetic construct
  source 1..19: mol_type = other RNA
gagtgcccggagctccgag

SEQ ID NO: 1958 - RNA, 19 nt, synthetic construct
  source 1..19: mol_type = other RNA
tgagtgcccggagctccga

SEQ ID NO: 1959 - RNA, 19 nt, synthetic construct
  source 1..19: mol_type = other RNA
ctgagtgcccggagctccg

SEQ ID NO: 1960 - RNA, 19 nt, synthetic construct
  source 1..19: mol_type = other RNA
tctgagtgcccggagctcc

SEQ ID NO: 1961 - RNA, 19 nt, synthetic construct
  source 1..19: mol_type = other RNA
gtctgagtgcccggagctc

SEQ ID NO: 1962 - RNA, 19 nt, synthetic construct
  source 1..19: mol_type = other RNA
tgtctgagtgcccggagct

SEQ ID NO: 1963 - RNA, 19 nt, synthetic construct
  source 1..19: mol_type = other RNA
atgtctgagtgcccggagc

SEQ ID NO: 1964 - RNA, 19 nt, synthetic construct
  source 1..19: mol_type = other RNA
gatgtctgagtgcccggag

SEQ ID NO: 1965 - RNA, 19 nt, synthetic construct
  source 1..19: mol_type = other RNA
tgatgtctgagtgcccgga

SEQ ID NO: 1966 - RNA, 19 nt, synthetic construct
  source 1..19: mol_type = other RNA
atgatgtctgagtgcccgg

SEQ ID NO: 1967 - RNA, 19 nt, synthetic construct
  source 1..19: mol_type = other RNA
catgatgtctgagtgcccg

SEQ ID NO: 1968 - RNA, 19 nt, synthetic construct
  source 1..19: mol_type = other RNA
tcatgatgtctgagtgccc

SEQ ID NO: 1969 - RNA, 19 nt, synthetic construct
  source 1..19: mol_type = other RNA
ctcatgatgtctgagtgcc

SEQ ID NO: 1970 - RNA, 19 nt, synthetic construct
  source 1..19: mol_type = other RNA
actcatgatgtctgagtgc

SEQ ID NO: 1971 - RNA, 19 nt, synthetic construct
  source 1..19: mol_type = other RNA
aactcatgatgtctgagtg

SEQ ID NO: 1972 - RNA, 19 nt, synthetic construct
  source 1..19: mol_type = other RNA
caactcatgatgtctgagt

SEQ ID NO: 1973 - RNA, 19 nt, synthetic construct
  source 1..19: mol_type = other RNA
ccaactcatgatgtctgag

SEQ ID NO: 1974 - RNA, 19 nt, synthetic construct
  source 1..19: mol_type = other RNA
accaactcatgatgtctga

SEQ ID NO: 1975 - RNA, 19 nt, synthetic construct
  source 1..19: mol_type = other RNA
gaccaactcatgatgtctg

SEQ ID NO: 1976 - RNA, 19 nt, synthetic construct
  source 1..19: mol_type = other RNA
ggaccaactcatgatgtct

SEQ ID NO: 1977 - RNA, 19 nt, synthetic construct
  source 1..19: mol_type = other RNA
aggaccaactcatgatgtc

SEQ ID NO: 1978 - RNA, 19 nt, synthetic construct
  source 1..19: mol_type = other RNA
aaggaccaactcatgatgt

SEQ ID NO: 1979 - RNA, 19 nt, synthetic construct
  source 1..19: mol_type = other RNA
caaggaccaactcatgatg

SEQ ID NO: 1980 - RNA, 19 nt, synthetic construct
  source 1..19: mol_type = other RNA
gcaaggaccaactcatgat

SEQ ID NO: 1981 - RNA, 19 nt, synthetic construct
  source 1..19: mol_type = other RNA
tgcaaggaccaactcatga

SEQ ID NO: 1982 - RNA, 19 nt, synthetic construct
  source 1..19: mol_type = other RNA
gtgcaaggaccaactcatg

SEQ ID NO: 1983 - RNA, 19 nt, synthetic construct
  source 1..19: mol_type = other RNA
ggtgcaaggaccaactcat

SEQ ID NO: 1984 - RNA, 19 nt, synthetic construct
  source 1..19: mol_type = other RNA
gggtgcaaggaccaactca

SEQ ID NO: 1985 - RNA, 19 nt, synthetic construct
  source 1..19: mol_type = other RNA
ggggtgcaaggaccaactc

SEQ ID NO: 1986 - RNA, 19 nt, synthetic construct
  source 1..19: mol_type = other RNA
gggggtgcaaggaccaact

SEQ ID NO: 1987 - RNA, 19 nt, synthetic construct
  source 1..19: mol_type = other RNA
cgggggtgcaaggaccaac

SEQ ID NO: 1988 - RNA, 19 nt, synthetic construct
  source 1..19: mol_type = other RNA
ccgggggtgcaaggaccaa

SEQ ID NO: 1989 - RNA, 19 nt, synthetic construct
  source 1..19: mol_type = other RNA
tccgggggtgcaaggacca

SEQ ID NO: 1990 - RNA, 19 nt, synthetic construct
  source 1..19: mol_type = other RNA
ttccgggggtgcaaggacc

SEQ ID NO: 1991 - RNA, 19 nt, synthetic construct
  source 1..19: mol_type = other RNA
attccgggggtgcaaggac

SEQ ID NO: 1992 - RNA, 19 nt, synthetic construct
  source 1..19: mol_type = other RNA
aattccgggggtgcaagga

SEQ ID NO: 1993 - RNA, 19 nt, synthetic construct
  source 1..19: mol_type = other RNA
aaattccgggggtgcaagg

SEQ ID NO: 1994 - RNA, 19 nt, synthetic construct
  source 1..19: mol_type = other RNA
taaattccgggggtgcaag

SEQ ID NO: 1995 - RNA, 19 nt, synthetic construct
  source 1..19: mol_type = other RNA
ttaaattccgggggtgcaa

SEQ ID NO: 1996 - RNA, 19 nt, synthetic construct
  source 1..19: mol_type = other RNA
attaaattccgggggtgca

SEQ ID NO: 1997 - RNA, 19 nt, synthetic construct
  source 1..19: mol_type = other RNA
aattaaattccgggggtgc

SEQ ID NO: 1998 - RNA, 19 nt, synthetic construct
  source 1..19: mol_type = other RNA
gaattaaattccgggggtg

SEQ ID NO: 1999 - RNA, 19 nt, synthetic construct
  source 1..19: mol_type = other RNA
agaattaaattccgggggt

SEQ ID NO: 2000 - RNA, 19 nt, synthetic construct
  source 1..19: mol_type = other RNA
gagaattaaattccggggg

SEQ ID NO: 2001 - RNA, 19 nt, synthetic construct
  source 1..19: mol_type = other RNA
agagaattaaattccgggg

SEQ ID NO: 2002 - RNA, 19 nt, synthetic construct
  source 1..19: mol_type = other RNA
tagagaattaaattccggg

SEQ ID NO: 2003 - RNA, 19 nt, synthetic construct
  source 1..19: mol_type = other RNA
gtagagaattaaattccgg

SEQ ID NO: 2004 - RNA, 19 nt, synthetic construct
  source 1..19: mol_type = other RNA
agtagagaattaaattccg

SEQ ID NO: 2005 - RNA, 19 nt, synthetic construct
  source 1..19: mol_type = other RNA
aagtagagaattaaattcc

SEQ ID NO: 2006 - RNA, 19 nt, synthetic construct
  source 1..19: mol_type = other RNA
gaagtagagaattaaattc

SEQ ID NO: 2007 - RNA, 19 nt, synthetic construct
  source 1..19: mol_type = other RNA
agaagtagagaattaaatt

SEQ ID NO: 2008 - RNA, 19 nt, synthetic construct
  source 1..19: mol_type = other RNA
tagaagtagagaattaaat

SEQ ID NO: 2009 - RNA, 19 nt, synthetic construct
  source 1..19: mol_type = other RNA
atagaagtagagaattaaa

SEQ ID NO: 2010 - RNA, 19 nt, synthetic construct
  source 1..19: mol_type = other RNA
catagaagtagagaattaa

SEQ ID NO: 2011 - RNA, 19 nt, synthetic construct
  source 1..19: mol_type = other RNA
gcatagaagtagagaatta

SEQ ID NO: 2012 - RNA, 19 nt, synthetic construct
  source 1..19: mol_type = other RNA
agcatagaagtagagaatt

SEQ ID NO: 2013 - RNA, 19 nt, synthetic construct
  source 1..19: mol_type = other RNA
gagcatagaagtagagaat

SEQ ID NO: 2014 - RNA, 19 nt, synthetic construct
  source 1..19: mol_type = other RNA
agagcatagaagtagagaa

SEQ ID NO: 2015 - RNA, 19 nt, synthetic construct
  source 1..19: mol_type = other RNA
aagagcatagaagtagaga

SEQ ID NO: 2016 - RNA, 19 nt, synthetic construct
  source 1..19: mol_type = other RNA
aaagagcatagaagtagag

SEQ ID NO: 2017 - RNA, 19 nt, synthetic construct
  source 1..19: mol_type = other RNA
aaaagagcatagaagtaga

SEQ ID NO: 2018 - RNA, 19 nt, synthetic construct
  source 1..19: mol_type = other RNA
taaaagagcatagaagtag

SEQ ID NO: 2019 - RNA, 19 nt, synthetic construct
  source 1..19: mol_type = other RNA
ataaaagagcatagaagta

SEQ ID NO: 2020 - RNA, 19 nt, synthetic construct
  source 1..19: mol_type = other RNA
aataaaagagcatagaagt

SEQ ID NO: 2021 - RNA, 19 nt, synthetic construct
  source 1..19: mol_type = other RNA
aaataaaagagcatagaag

SEQ ID NO: 2022 - RNA, 19 nt, synthetic construct
  source 1..19: mol_type = other RNA
gaaataaaagagcatagaa

SEQ ID NO: 2023 - RNA, 19 nt, synthetic construct
  source 1..19: mol_type = other RNA
agaaataaaagagcataga

SEQ ID NO: 2024 - RNA, 19 nt, synthetic construct
  source 1..19: mol_type = other RNA
gagaaataaaagagcatag

SEQ ID NO: 2025 - RNA, 19 nt, synthetic construct
  source 1..19: mol_type = other RNA
agagaaataaaagagcata

SEQ ID NO: 2026 - RNA, 19 nt, synthetic construct
  source 1..19: mol_type = other RNA
gagagaaataaaagagcat

SEQ ID NO: 2027 - RNA, 19 nt, synthetic construct
  source 1..19: mol_type = other RNA
agagagaaataaaagagca

SEQ ID NO: 2028 - RNA, 19 nt, synthetic construct
  source 1..19: mol_type = other RNA
aagagagaaataaaagagc

SEQ ID NO: 2029 - RNA, 19 nt, synthetic construct
  source 1..19: mol_type = other RNA
gaagagagaaataaaagag

SEQ ID NO: 2030 - RNA, 19 nt, synthetic construct
  source 1..19: mol_type = other RNA
tgaagagagaaataaaaga

SEQ ID NO: 2031 - RNA, 19 nt, synthetic construct
  source 1..19: mol_type = other RNA
ttgaagagagaaataaaag

SEQ ID NO: 2032 - RNA, 19 nt, synthetic construct
  source 1..19: mol_type = other RNA
gttgaagagagaaataaaa

SEQ ID NO: 2033 - RNA, 19 nt, synthetic construct
  source 1..19: mol_type = other RNA
tgttgaagagagaaataaa

SEQ ID NO: 2034 - RNA, 19 nt, synthetic construct
  source 1..19: mol_type = other RNA
atgttgaagagagaaataa

SEQ ID NO: 2035 - RNA, 19 nt, synthetic construct
  source 1..19: mol_type = other RNA
catgttgaagagagaaata

SEQ ID NO: 2036 - RNA, 19 nt, synthetic construct
  source 1..19: mol_type = other RNA
acatgttgaagagagaaat

SEQ ID NO: 2037 - RNA, 19 nt, synthetic construct
  source 1..19: mol_type = other RNA
cacatgttgaagagagaaa

SEQ ID NO: 2038 - RNA, 19 nt, synthetic construct
  source 1..19: mol_type = other RNA
acacatgttgaagagagaa

SEQ ID NO: 2039 - RNA, 19 nt, synthetic construct
  source 1..19: mol_type = other RNA
tacacatgttgaagagaga

SEQ ID NO: 2040 - RNA, 19 nt, synthetic construct
  source 1..19: mol_type = other RNA
ctacacatgttgaagagag

SEQ ID NO: 2041 - RNA, 19 nt, synthetic construct
  source 1..19: mol_type = other RNA
gctacacatgttgaagaga

SEQ ID NO: 2042 - RNA, 19 nt, synthetic construct
  source 1..19: mol_type = other RNA
tgctacacatgttgaagag

SEQ ID NO: 2043 - RNA, 19 nt, synthetic construct
  source 1..19: mol_type = other RNA
atgctacacatgttgaaga

SEQ ID NO: 2044 - RNA, 19 nt, synthetic construct
  source 1..19: mol_type = other RNA
tatgctacacatgttgaag

SEQ ID NO: 2045 - RNA, 19 nt, synthetic construct
  source 1..19: mol_type = other RNA
atatgctacacatgttgaa

SEQ ID NO: 2046 - RNA, 19 nt, synthetic construct
  source 1..19: mol_type = other RNA
catatgctacacatgttga

SEQ ID NO: 2047 - RNA, 19 nt, synthetic construct
  source 1..19: mol_type = other RNA
acatatgctacacatgttg

SEQ ID NO: 2048 - RNA, 19 nt, synthetic construct
  source 1..19: mol_type = other RNA
aacatatgctacacatgtt

SEQ ID NO: 2049 - RNA, 19 nt, synthetic construct
  source 1..19: mol_type = other RNA
caacatatgctacacatgt

SEQ ID NO: 2050 - RNA, 19 nt, synthetic construct
  source 1..19: mol_type = other RNA
gcaacatatgctacacatg

SEQ ID NO: 2051 - RNA, 19 nt, synthetic construct
  source 1..19: mol_type = other RNA
agcaacatatgctacacat

SEQ ID NO: 2052 - RNA, 19 nt, synthetic construct
  source 1..19: mol_type = other RNA
tagcaacatatgctacaca

SEQ ID NO: 2053 - RNA, 19 nt, synthetic construct
  source 1..19: mol_type = other RNA
gtagcaacatatgctacac

SEQ ID NO: 2054 - RNA, 19 nt, synthetic construct
  source 1..19: mol_type = other RNA
ggtagcaacatatgctaca

SEQ ID NO: 2055 - RNA, 19 nt, synthetic construct
  source 1..19: mol_type = other RNA
tggtagcaacatatgctac

SEQ ID NO: 2056 - RNA, 19 nt, synthetic construct
  source 1..19: mol_type = other RNA
ctggtagcaacatatgcta

SEQ ID NO: 2057 - RNA, 19 nt, synthetic construct
  source 1..19: mol_type = other RNA
tctggtagcaacatatgct

SEQ ID NO: 2058 - RNA, 19 nt, synthetic construct
  source 1..19: mol_type = other RNA
ctctggtagcaacatatgc

SEQ ID NO: 2059 - RNA, 19 nt, synthetic construct
  source 1..19: mol_type = other RNA
tctctggtagcaacatatg

SEQ ID NO: 2060 - RNA, 19 nt, synthetic construct
  source 1..19: mol_type = other RNA
gtctctggtagcaacatat

SEQ ID NO: 2061 - RNA, 19 nt, synthetic construct
  source 1..19: mol_type = other RNA
tgtctctggtagcaacata

SEQ ID NO: 2062 - RNA, 19 nt, synthetic construct
  source 1..19: mol_type = other RNA
ttgtctctggtagcaacat

SEQ ID NO: 2063 - RNA, 19 nt, synthetic construct
  source 1..19: mol_type = other RNA
gttgtctctggtagcaaca

SEQ ID NO: 2064 - RNA, 19 nt, synthetic construct
  source 1..19: mol_type = other RNA
agttgtctctggtagcaac

SEQ ID NO: 2065 - RNA, 19 nt, synthetic construct
  source 1..19: mol_type = other RNA
cagttgtctctggtagcaa

SEQ ID NO: 2066 - RNA, 19 nt, synthetic construct
  source 1..19: mol_type = other RNA
gcagttgtctctggtagca

SEQ ID NO: 2067 - RNA, 19 nt, synthetic construct
  source 1..19: mol_type = other RNA
agcagttgtctctggtagc

SEQ ID NO: 2068 - RNA, 19 nt, synthetic construct
  source 1..19: mol_type = other RNA
cagcagttgtctctggtag

SEQ ID NO: 2069 - RNA, 19 nt, synthetic construct
  source 1..19: mol_type = other RNA
gcagcagttgtctctggta

SEQ ID NO: 2070 - RNA, 19 nt, synthetic construct
  source 1..19: mol_type = other RNA
tgcagcagttgtctctggt

SEQ ID NO: 2071 - RNA, 19 nt, synthetic construct
  source 1..19: mol_type = other RNA
atgcagcagttgtctctgg

SEQ ID NO: 2072 - RNA, 19 nt, synthetic construct
  source 1..19: mol_type = other RNA
gatgcagcagttgtctctg

SEQ ID NO: 2073 - RNA, 19 nt, synthetic construct
  source 1..19: mol_type = other RNA
agatgcagcagttgtctct

SEQ ID NO: 2074 - RNA, 19 nt, synthetic construct
  source 1..19: mol_type = other RNA
aagatgcagcagttgtctc

SEQ ID NO: 2075 - RNA, 19 nt, synthetic construct
  source 1..19: mol_type = other RNA
taagatgcagcagttgtct

SEQ ID NO: 2076 - RNA, 19 nt, synthetic construct
  source 1..19: mol_type = other RNA
ctaagatgcagcagttgtc

SEQ ID NO: 2077 - RNA, 19 nt, synthetic construct
  source 1..19: mol_type = other RNA
tctaagatgcagcagttgt

SEQ ID NO: 2078 - RNA, 19 nt, synthetic construct
  source 1..19: mol_type = other RNA
atctaagatgcagcagttg

SEQ ID NO: 2079 - RNA, 19 nt, synthetic construct
  source 1..19: mol_type = other RNA
catctaagatgcagcagtt

SEQ ID NO: 2080 - RNA, 19 nt, synthetic construct
  source 1..19: mol_type = other RNA
tcatctaagatgcagcagt

SEQ ID NO: 2081 - RNA, 19 nt, synthetic construct
  source 1..19: mol_type = other RNA
ttcatctaagatgcagcag

SEQ ID NO: 2082 - RNA, 19 nt, synthetic construct
  source 1..19: mol_type = other RNA
tttcatctaagatgcagca

SEQ ID NO: 2083 - RNA, 19 nt, synthetic construct
  source 1..19: mol_type = other RNA
ctttcatctaagatgcagc

SEQ ID NO: 2084 - RNA, 19 nt, synthetic construct
  source 1..19: mol_type = other RNA
tctttcatctaagatgcag

SEQ ID NO: 2085 - RNA, 19 nt, synthetic construct
  source 1..19: mol_type = other RNA
atctttcatctaagatgca

SEQ ID NO: 2086 - RNA, 19 nt, synthetic construct
  source 1..19: mol_type = other RNA
aatctttcatctaagatgc

SEQ ID NO: 2087 - RNA, 19 nt, synthetic construct
  source 1..19: mol_type = other RNA
gaatctttcatctaagatg

SEQ ID NO: 2088 - RNA, 19 nt, synthetic construct
  source 1..19: mol_type = other RNA
cgaatctttcatctaagat

SEQ ID NO: 2089 - RNA, 19 nt, synthetic construct
  source 1..19: mol_type = other RNA
ccgaatctttcatctaaga

SEQ ID NO: 2090 - RNA, 19 nt, synthetic construct
  source 1..19: mol_type = other RNA
accgaatctttcatctaag

SEQ ID NO: 2091 - RNA, 19 nt, synthetic construct
  source 1..19: mol_type = other RNA
taccgaatctttcatctaa

SEQ ID NO: 2092 - RNA, 19 nt, synthetic construct
  source 1..19: mol_type = other RNA
ctaccgaatctttcatcta

SEQ ID NO: 2093 - RNA, 19 nt, synthetic construct
  source 1..19: mol_type = other RNA
actaccgaatctttcatct

SEQ ID NO: 2094 - RNA, 19 nt, synthetic construct
  source 1..19: mol_type = other RNA
aactaccgaatctttcatc

SEQ ID NO: 2095 - RNA, 19 nt, synthetic construct
  source 1..19: mol_type = other RNA
taactaccgaatctttcat

SEQ ID NO: 2096 - RNA, 19 nt, synthetic construct
  source 1..19: mol_type = other RNA
ataactaccgaatctttca

SEQ ID NO: 2097 - RNA, 19 nt, synthetic construct
  source 1..19: mol_type = other RNA
aataactaccgaatctttc

SEQ ID NO: 2098 - RNA, 19 nt, synthetic construct
  source 1..19: mol_type = other RNA
caataactaccgaatcttt

SEQ ID NO: 2099 - RNA, 19 nt, synthetic construct
  source 1..19: mol_type = other RNA
acaataactaccgaatctt

SEQ ID NO: 2100 - RNA, 19 nt, synthetic construct
  source 1..19: mol_type = other RNA
gacaataactaccgaatct

SEQ ID NO: 2101 - RNA, 19 nt, synthetic construct
  source 1..19: mol_type = other RNA
ggacaataactaccgaatc

SEQ ID NO: 2102 - RNA, 19 nt, synthetic construct
  source 1..19: mol_type = other RNA
tggacaataactaccgaat

SEQ ID NO: 2103 - RNA, 19 nt, synthetic construct
  source 1..19: mol_type = other RNA
ttggacaataactaccgaa

SEQ ID NO: 2104 - RNA, 19 nt, synthetic construct
  source 1..19: mol_type = other RNA
gttggacaataactaccga

SEQ ID NO: 2105 - RNA, 19 nt, synthetic construct
  source 1..19: mol_type = other RNA
agttggacaataactaccg

SEQ ID NO: 2106 - RNA, 19 nt, synthetic construct
  source 1..19: mol_type = other RNA
tagttggacaataactacc

SEQ ID NO: 2107 - RNA, 19 nt, synthetic construct
  source 1..19: mol_type = other RNA
gtagttggacaataactac

SEQ ID NO: 2108 - RNA, 19 nt, synthetic construct
  source 1..19: mol_type = other RNA
ggtagttggacaataacta

SEQ ID NO: 2109 - RNA, 19 nt, synthetic construct
  source 1..19: mol_type = other RNA
aggtagttggacaataact

SEQ ID NO: 2110 - RNA, 19 nt, synthetic construct
  source 1..19: mol_type = other RNA
caggtagttggacaataac

SEQ ID NO: 2111 - RNA, 19 nt, synthetic construct
  source 1..19: mol_type = other RNA
acaggtagttggacaataa

SEQ ID NO: 2112 - RNA, 19 nt, synthetic construct
  source 1..19: mol_type = other RNA
cacaggtagttggacaata

SEQ ID NO: 2113 - RNA, 19 nt, synthetic construct
  source 1..19: mol_type = other RNA
ccacaggtagttggacaat

SEQ ID NO: 2114 - RNA, 19 nt, synthetic construct
  source 1..19: mol_type = other RNA
gccacaggtagttggacaa

SEQ ID NO: 2115 - RNA, 19 nt, synthetic construct
  source 1..19: mol_type = other RNA
tgccacaggtagttggaca

SEQ ID NO: 2116 - RNA, 19 nt, synthetic construct
  source 1..19: mol_type = other RNA
atgccacaggtagttggac

SEQ ID NO: 2117 - RNA, 19 nt, synthetic construct
  source 1..19: mol_type = other RNA
aatgccacaggtagttgga

SEQ ID NO: 2118 - RNA, 19 nt, synthetic construct
  source 1..19: mol_type = other RNA
caatgccacaggtagttgg

SEQ ID NO: 2119 - RNA, 19 nt, synthetic construct
  source 1..19: mol_type = other RNA
gcaatgccacaggtagttg

SEQ ID NO: 2120 - RNA, 19 nt, synthetic construct
  source 1..19: mol_type = other RNA
tgcaatgccacaggtagtt

SEQ ID NO: 2121 - RNA, 19 nt, synthetic construct
  source 1..19: mol_type = other RNA
ctgcaatgccacaggtagt

SEQ ID NO: 2122 - RNA, 19 nt, synthetic construct
  source 1..19: mol_type = other RNA
tctgcaatgccacaggtag

SEQ ID NO: 2123 - RNA, 19 nt, synthetic construct
  source 1..19: mol_type = other RNA
atctgcaatgccacaggta

SEQ ID NO: 2124 - RNA, 19 nt, synthetic construct
  source 1..19: mol_type = other RNA
aatctgcaatgccacaggt

SEQ ID NO: 2125 - RNA, 19 nt, synthetic construct
  source 1..19: mol_type = other RNA
aaatctgcaatgccacagg

SEQ ID NO: 2126 - RNA, 19 nt, synthetic construct
  source 1..19: mol_type = other RNA
gaaatctgcaatgccacag

SEQ ID NO: 2127 - RNA, 19 nt, synthetic construct
  source 1..19: mol_type = other RNA
ggaaatctgcaatgccaca

SEQ ID NO: 2128 - RNA, 19 nt, synthetic construct
  source 1..19: mol_type = other RNA
aggaaatctgcaatgccac

SEQ ID NO: 2129 - RNA, 19 nt, synthetic construct
  source 1..19: mol_type = other RNA
caggaaatctgcaatgcca

SEQ ID NO: 2130 - RNA, 19 nt, synthetic construct
  source 1..19: mol_type = other RNA
acaggaaatctgcaatgcc

SEQ ID NO: 2131 - RNA, 19 nt, synthetic construct
  source 1..19: mol_type = other RNA
gacaggaaatctgcaatgc

SEQ ID NO: 2132 - RNA, 19 nt, synthetic construct
  source 1..19: mol_type = other RNA
agacaggaaatctgcaatg

SEQ ID NO: 2133 - RNA, 19 nt, synthetic construct
  source 1..19: mol_type = other RNA
tagacaggaaatctgcaat

SEQ ID NO: 2134 - RNA, 19 nt, synthetic construct
  source 1..19: mol_type = other RNA
gtagacaggaaatctgcaa

SEQ ID NO: 2135 - RNA, 19 nt, synthetic construct
  source 1..19: mol_type = other RNA
agtagacaggaaatctgca

SEQ ID NO: 2136 - RNA, 19 nt, synthetic construct
  source 1..19: mol_type = other RNA
aagtagacaggaaatctgc

SEQ ID NO: 2137 - RNA, 19 nt, synthetic construct
  source 1..19: mol_type = other RNA
taagtagacaggaaatctg

SEQ ID NO: 2138 - RNA, 19 nt, synthetic construct
  source 1..19: mol_type = other RNA
ataagtagacaggaaatct

SEQ ID NO: 2139 - RNA, 19 nt, synthetic construct
  source 1..19: mol_type = other RNA
gataagtagacaggaaatc

SEQ ID NO: 2140 - RNA, 19 nt, synthetic construct
  source 1..19: mol_type = other RNA
tgataagtagacaggaaat

SEQ ID NO: 2141 - RNA, 19 nt, synthetic construct
  source 1..19: mol_type = other RNA
ttgataagtagacaggaaa

SEQ ID NO: 2142 - RNA, 19 nt, synthetic construct
  source 1..19: mol_type = other RNA
tttgataagtagacaggaa

SEQ ID NO: 2143 - RNA, 19 nt, synthetic construct
  source 1..19: mol_type = other RNA
gtttgataagtagacagga

SEQ ID NO: 2144 - RNA, 19 nt, synthetic construct
  source 1..19: mol_type = other RNA
ggtttgataagtagacagg

SEQ ID NO: 2145 - RNA, 19 nt, synthetic construct
  source 1..19: mol_type = other RNA
tggtttgataagtagacag

SEQ ID NO: 2146 - RNA, 19 nt, synthetic construct
  source 1..19: mol_type = other RNA
ttggtttgataagtagaca

SEQ ID NO: 2147 - RNA, 19 nt, synthetic construct
  source 1..19: mol_type = other RNA
tttggtttgataagtagac

SEQ ID NO: 2148 - RNA, 19 nt, synthetic construct
  source 1..19: mol_type = other RNA
ctttggtttgataagtaga

SEQ ID NO: 2149 - RNA, 19 nt, synthetic construct
  source 1..19: mol_type = other RNA
actttggtttgataagtag

SEQ ID NO: 2150 - RNA, 19 nt, synthetic construct
  source 1..19: mol_type = other RNA
tactttggtttgataagta

SEQ ID NO: 2151 - RNA, 19 nt, synthetic construct
  source 1..19: mol_type = other RNA
ctactttggtttgataagt

SEQ ID NO: 2152 - RNA, 19 nt, synthetic construct
  source 1..19: mol_type = other RNA
tctactttggtttgataag

SEQ ID NO: 2153 - RNA, 19 nt, synthetic construct
  source 1..19: mol_type = other RNA
gtctactttggtttgataa

SEQ ID NO: 2154 - RNA, 19 nt, synthetic construct
  source 1..19: mol_type = other RNA
tgtctactttggtttgata

SEQ ID NO: 2155 - RNA, 19 nt, synthetic construct
  source 1..19: mol_type = other RNA
ttgtctactttggtttgat

SEQ ID NO: 2156 - RNA, 19 nt, synthetic construct
  source 1..19: mol_type = other RNA
cttgtctactttggtttga

SEQ ID NO: 2157 - RNA, 19 nt, synthetic construct
  source 1..19: mol_type = other RNA
ccttgtctactttggtttg

SEQ ID NO: 2158 - RNA, 19 nt, synthetic construct
  source 1..19: mol_type = other RNA
tccttgtctactttggttt

SEQ ID NO: 2159 - RNA, 19 nt, synthetic construct
  source 1..19: mol_type = other RNA
atccttgtctactttggtt

SEQ ID NO: 2160 - RNA, 19 nt, synthetic construct
  source 1..19: mol_type = other RNA
gatccttgtctactttggt

SEQ ID NO: 2161 - RNA, 19 nt, synthetic construct
  source 1..19: mol_type = other RNA
agatccttgtctactttgg

SEQ ID NO: 2162 - RNA, 19 nt, synthetic construct
  source 1..19: mol_type = other RNA
tagatccttgtctactttg

SEQ ID NO: 2163 - RNA, 19 nt, synthetic construct
  source 1..19: mol_type = other RNA
gtagatccttgtctacttt

SEQ ID NO: 2164 - RNA, 19 nt, synthetic construct
  source 1..19: mol_type = other RNA
tgtagatccttgtctactt

SEQ ID NO: 2165 - RNA, 19 nt, synthetic construct
  source 1..19: mol_type = other RNA
ctgtagatccttgtctact

SEQ ID NO: 2166 - RNA, 19 nt, synthetic construct
  source 1..19: mol_type = other RNA
actgtagatccttgtctac

SEQ ID NO: 2167 - RNA, 19 nt, synthetic construct
  source 1..19: mol_type = other RNA
gactgtagatccttgtcta

SEQ ID NO: 2168 - RNA, 19 nt, synthetic construct
  source 1..19: mol_type = other RNA
agactgtagatccttgtct

SEQ ID NO: 2169 - RNA, 19 nt, synthetic construct
  source 1..19: mol_type = other RNA
aagactgtagatccttgtc

SEQ ID NO: 2170 - RNA, 19 nt, synthetic construct
  source 1..19: mol_type = other RNA
aaagactgtagatccttgt

SEQ ID NO: 2171 - RNA, 19 nt, synthetic construct
  source 1..19: mol_type = other RNA
caaagactgtagatccttg

SEQ ID NO: 2172 - RNA, 19 nt, synthetic construct
  source 1..19: mol_type = other RNA
ccaaagactgtagatcctt

SEQ ID NO: 2173 - RNA, 19 nt, synthetic construct
  source 1..19: mol_type = other RNA
tccaaagactgtagatcct

SEQ ID NO: 2174 - RNA, 19 nt, synthetic construct
  source 1..19: mol_type = other RNA
ttccaaagactgtagatcc

SEQ ID NO: 2175 - RNA, 19 nt, synthetic construct
  source 1..19: mol_type = other RNA
cttccaaagactgtagatc

SEQ ID NO: 2176 - RNA, 19 nt, synthetic construct
  source 1..19: mol_type = other RNA
tcttccaaagactgtagat

SEQ ID NO: 2177 - RNA, 19 nt, synthetic construct
  source 1..19: mol_type = other RNA
gtcttccaaagactgtaga

SEQ ID NO: 2178 - RNA, 19 nt, synthetic construct
  source 1..19: mol_type = other RNA
tgtcttccaaagactgtag

SEQ ID NO: 2179 - RNA, 19 nt, synthetic construct
  source 1..19: mol_type = other RNA
atgtcttccaaagactgta

SEQ ID NO: 2180 - RNA, 19 nt, synthetic construct
  source 1..19: mol_type = other RNA
gatgtcttccaaagactgt

SEQ ID NO: 2181 - RNA, 19 nt, synthetic construct
  source 1..19: mol_type = other RNA
agatgtcttccaaagactg

SEQ ID NO: 2182 - RNA, 19 nt, synthetic construct
  source 1..19: mol_type = other RNA
aagatgtcttccaaagact

SEQ ID NO: 2183 - RNA, 19 nt, synthetic construct
  source 1..19: mol_type = other RNA
taagatgtcttccaaagac

SEQ ID NO: 2184 - RNA, 19 nt, synthetic construct
  source 1..19: mol_type = other RNA
gtaagatgtcttccaaaga

SEQ ID NO: 2185 - RNA, 19 nt, synthetic construct
  source 1..19: mol_type = other RNA
tgtaagatgtcttccaaag

SEQ ID NO: 2186 - RNA, 19 nt, synthetic construct
  source 1..19: mol_type = other RNA
atgtaagatgtcttccaaa

SEQ ID NO: 2187 - RNA, 19 nt, synthetic construct
  source 1..19: mol_type = other RNA
gatgtaagatgtcttccaa

SEQ ID NO: 2188 - RNA, 19 nt, synthetic construct
  source 1..19: mol_type = other RNA
tgatgtaagatgtcttcca

SEQ ID NO: 2189 - RNA, 19 nt, synthetic construct
  source 1..19: mol_type = other RNA
ttgatgtaagatgtcttcc

SEQ ID NO: 2190 - RNA, 19 nt, synthetic construct
  source 1..19: mol_type = other RNA
cttgatgtaagatgtcttc

SEQ ID NO: 2191 - RNA, 19 nt, synthetic construct
  source 1..19: mol_type = other RNA
acttgatgtaagatgtctt

SEQ ID NO: 2192 - RNA, 19 nt, synthetic construct
  source 1..19: mol_type = other RNA
aacttgatgtaagatgtct

SEQ ID NO: 2193 - RNA, 19 nt, synthetic construct
  source 1..19: mol_type = other RNA
caacttgatgtaagatgtc

SEQ ID NO: 2194 - RNA, 19 nt, synthetic construct
  source 1..19: mol_type = other RNA
tcaacttgatgtaagatgt

SEQ ID NO: 2195 - RNA, 19 nt, synthetic construct
  source 1..19: mol_type = other RNA
ttcaacttgatgtaagatg

SEQ ID NO: 2196 - RNA, 19 nt, synthetic construct
  source 1..19: mol_type = other RNA
tttcaacttgatgtaagat

SEQ ID NO: 2197 - RNA, 19 nt, synthetic construct
  source 1..19: mol_type = other RNA
ttttcaacttgatgtaaga

SEQ ID NO: 2198 - RNA, 19 nt, synthetic construct
  source 1..19: mol_type = other RNA
gttttcaacttgatgtaag

SEQ ID NO: 2199 - RNA, 19 nt, synthetic construct
  source 1..19: mol_type = other RNA
tgttttcaacttgatgtaa

SEQ ID NO: 2200 - RNA, 19 nt, synthetic construct
  source 1..19: mol_type = other RNA
ttgttttcaacttgatgta

SEQ ID NO: 2201 - RNA, 19 nt, synthetic construct
  source 1..19: mol_type = other RNA
tttgttttcaacttgatgt

SEQ ID NO: 2202 - RNA, 19 nt, synthetic construct
  source 1..19: mol_type = other RNA
ttttgttttcaacttgatg

SEQ ID NO: 2203 - RNA, 19 nt, synthetic construct
  source 1..19: mol_type = other RNA
gttttgttttcaacttgat

SEQ ID NO: 2204 - RNA, 19 nt, synthetic construct
  source 1..19: mol_type = other RNA
tgttttgttttcaacttga

SEQ ID NO: 2205 - RNA, 19 nt, synthetic construct
  source 1..19: mol_type = other RNA
atgttttgttttcaacttg

SEQ ID NO: 2206 - RNA, 19 nt, synthetic construct
  source 1..19: mol_type = other RNA
gatgttttgttttcaactt

SEQ ID NO: 2207 - RNA, 19 nt, synthetic construct
  source 1..19: mol_type = other RNA
tgatgttttgttttcaact

SEQ ID NO: 2208 - RNA, 19 nt, synthetic construct
  source 1..19: mol_type = other RNA
ctgatgttttgttttcaac

SEQ ID NO: 2209 - RNA, 19 nt, synthetic construct
  source 1..19: mol_type = other RNA
tctgatgttttgttttcaa

SEQ ID NO: 2210 - RNA, 19 nt, synthetic construct
  source 1..19: mol_type = other RNA
ttctgatgttttgttttca

SEQ ID NO: 2211 - RNA, 19 nt, synthetic construct
  source 1..19: mol_type = other RNA
cttctgatgttttgttttc

SEQ ID NO: 2212 - RNA, 19 nt, synthetic construct
  source 1..19: mol_type = other RNA
acttctgatgttttgtttt

SEQ ID NO: 2213 - RNA, 19 nt, synthetic construct
  source 1..19: mol_type = other RNA
gacttctgatgttttgttt

SEQ ID NO: 2214 - RNA, 19 nt, synthetic construct
  source 1..19: mol_type = other RNA
tgacttctgatgttttgtt

SEQ ID NO: 2215 - RNA, 19 nt, synthetic construct
  source 1..19: mol_type = other RNA
ttgacttctgatgttttgt

SEQ ID NO: 2216 - RNA, 19 nt, synthetic construct
  source 1..19: mol_type = other RNA
tttgacttctgatgttttg

SEQ ID NO: 2217 - RNA, 19 nt, synthetic construct
  source 1..19: mol_type = other RNA
gtttgacttctgatgtttt

SEQ ID NO: 2218 - RNA, 19 nt, synthetic construct
  source 1..19: mol_type = other RNA
tgtttgacttctgatgttt

SEQ ID NO: 2219 - RNA, 19 nt, synthetic construct
  source 1..19: mol_type = other RNA
ctgtttgacttctgatgtt

SEQ ID NO: 2220 - RNA, 19 nt, synthetic construct
  source 1..19: mol_type = other RNA
gctgtttgacttctgatgt

SEQ ID NO: 2221 - RNA, 19 nt, synthetic construct
  source 1..19: mol_type = other RNA
agctgtttgacttctgatg

SEQ ID NO: 2222 - RNA, 19 nt, synthetic construct
  source 1..19: mol_type = other RNA
cagctgtttgacttctgat

SEQ ID NO: 2223 - RNA, 19 nt, synthetic construct
  source 1..19: mol_type = other RNA
tcagctgtttgacttctga

SEQ ID NO: 2224 - RNA, 19 nt, synthetic construct
  source 1..19: mol_type = other RNA
atcagctgtttgacttctg

SEQ ID NO: 2225 - RNA, 19 nt, synthetic construct
  source 1..19: mol_type = other RNA
tatcagctgtttgacttct

SEQ ID NO: 2226 - RNA, 19 nt, synthetic construct
  source 1..19: mol_type = other RNA
ttatcagctgtttgacttc

SEQ ID NO: 2227 - RNA, 19 nt, synthetic construct
  source 1..19: mol_type = other RNA
tttatcagctgtttgactt

SEQ ID NO: 2228 - RNA, 19 nt, synthetic construct
  source 1..19: mol_type = other RNA
ttttatcagctgtttgact

SEQ ID NO: 2229 - RNA, 19 nt, synthetic construct
  source 1..19: mol_type = other RNA
cttttatcagctgtttgac

SEQ ID NO: 2230 - RNA, 19 nt, synthetic construct
  source 1..19: mol_type = other RNA
gcttttatcagctgtttga

SEQ ID NO: 2231 - RNA, 19 nt, synthetic construct
  source 1..19: mol_type = other RNA
tgcttttatcagctgtttg

SEQ ID NO: 2232 - RNA, 19 nt, synthetic construct
  source 1..19: mol_type = other RNA
ttgcttttatcagctgttt

SEQ ID NO: 2233 - RNA, 19 nt, synthetic construct
  source 1..19: mol_type = other RNA
attgcttttatcagctgtt

SEQ ID NO: 2234 - RNA, 19 nt, synthetic construct
  source 1..19: mol_type = other RNA
gattgcttttatcagctgt

SEQ ID NO: 2235 - RNA, 19 nt, synthetic construct
  source 1..19: mol_type = other RNA
ggattgcttttatcagctg

SEQ ID NO: 2236 - RNA, 19 nt, synthetic construct
  source 1..19: mol_type = other RNA
tggattgcttttatcagct

SEQ ID NO: 2237 - RNA, 19 nt, synthetic construct
  source 1..19: mol_type = other RNA
ttggattgcttttatcagc

SEQ ID NO: 2238 - RNA, 19 nt, synthetic construct
  source 1..19: mol_type = other RNA
gttggattgcttttatcag

SEQ ID NO: 2239 - RNA, 19 nt, synthetic construct
  source 1..19: mol_type = other RNA
agttggattgcttttatca

SEQ ID NO: 2240 - RNA, 19 nt, synthetic construct
  source 1..19: mol_type = other RNA
gagttggattgcttttatc

SEQ ID NO: 2241 - RNA, 19 nt, synthetic construct
  source 1..19: mol_type = other RNA
tgagttggattgcttttat

SEQ ID NO: 2242 - RNA, 19 nt, synthetic construct
  source 1..19: mol_type = other RNA
gtgagttggattgctttta

SEQ ID NO: 2243 - RNA, 19 nt, synthetic construct
  source 1..19: mol_type = other RNA
agtgagttggattgctttt

SEQ ID NO: 2244 - RNA, 19 nt, synthetic construct
  source 1..19: mol_type = other RNA
aagtgagttggattgcttt

SEQ ID NO: 2245 - RNA, 19 nt, synthetic construct
  source 1..19: mol_type = other RNA
taagtgagttggattgctt

SEQ ID NO: 2246 - RNA, 19 nt, synthetic construct
  source 1..19: mol_type = other RNA
ataagtgagttggattgct

SEQ ID NO: 2247 - RNA, 19 nt, synthetic construct
  source 1..19: mol_type = other RNA
tataagtgagttggattgc

SEQ ID NO: 2248 - RNA, 19 nt, synthetic construct
  source 1..19: mol_type = other RNA
ttataagtgagttggattg

SEQ ID NO: 2249 - RNA, 19 nt, synthetic construct
  source 1..19: mol_type = other RNA
attataagtgagttggatt

SEQ ID NO: 2250 - RNA, 19 nt, synthetic construct
  source 1..19: mol_type = other RNA
gattataagtgagttggat

SEQ ID NO: 2251 - RNA, 19 nt, synthetic construct
  source 1..19: mol_type = other RNA
ggattataagtgagttgga

SEQ ID NO: 2252 - RNA, 19 nt, synthetic construct
  source 1..19: mol_type = other RNA
aggattataagtgagttgg

SEQ ID NO: 2253 - RNA, 19 nt, synthetic construct
  source 1..19: mol_type = other RNA
caggattataagtgagttg

SEQ ID NO: 2254 - RNA, 19 nt, synthetic construct
  source 1..19: mol_type = other RNA
tcaggattataagtgagtt

SEQ ID NO: 2255 - RNA, 19 nt, synthetic construct
  source 1..19: mol_type = other RNA
atcaggattataagtgagt

SEQ ID NO: 2256 - RNA, 19 nt, synthetic construct
  source 1..19: mol_type = other RNA
catcaggattataagtgag

SEQ ID NO: 2257 - RNA, 19 nt, synthetic construct
  source 1..19: mol_type = other RNA
tcatcaggattataagtga

SEQ ID NO: 2258 - RNA, 19 nt, synthetic construct
  source 1..19: mol_type = other RNA
ttcatcaggattataagtg

SEQ ID NO: 2259 - RNA, 19 nt, synthetic construct
  source 1..19: mol_type = other RNA
attcatcaggattataagt

SEQ ID NO: 2260 - RNA, 19 nt, synthetic construct
  source 1..19: mol_type = other RNA
gattcatcaggattataag

SEQ ID NO: 2261 - RNA, 19 nt, synthetic construct
  source 1..19: mol_type = other RNA
tgattcatcaggattataa

SEQ ID NO: 2262 - RNA, 19 nt, synthetic construct
  source 1..19: mol_type = other RNA
atgattcatcaggattata

SEQ ID NO: 2263 - RNA, 19 nt, synthetic construct
  source 1..19: mol_type = other RNA
gatgattcatcaggattat

SEQ ID NO: 2264 - RNA, 19 nt, synthetic construct
  source 1..19: mol_type = other RNA
tgatgattcatcaggatta

SEQ ID NO: 2265 - RNA, 19 nt, synthetic construct
  source 1..19: mol_type = other RNA
ttgatgattcatcaggatt

SEQ ID NO: 2266 - RNA, 19 nt, synthetic construct
  source 1..19: mol_type = other RNA
tttgatgattcatcaggat

SEQ ID NO: 2267 - RNA, 19 nt, synthetic construct
  source 1..19: mol_type = other RNA
ttttgatgattcatcagga

SEQ ID NO: 2268 - RNA, 19 nt, synthetic construct
  source 1..19: mol_type = other RNA
gttttgatgattcatcagg

SEQ ID NO: 2269 - RNA, 19 nt, synthetic construct
  source 1..19: mol_type = other RNA
ggttttgatgattcatcag

SEQ ID NO: 2270 - RNA, 19 nt, synthetic construct
  source 1..19: mol_type = other RNA
tggttttgatgattcatca

SEQ ID NO: 2271 - RNA, 19 nt, synthetic construct
  source 1..19: mol_type = other RNA
ttggttttgatgattcatc

SEQ ID NO: 2272 - RNA, 19 nt, synthetic construct
  source 1..19: mol_type = other RNA
tttggttttgatgattcat

SEQ ID NO: 2273 - RNA, 19 nt, synthetic construct
  source 1..19: mol_type = other RNA
atttggttttgatgattca

SEQ ID NO: 2274 - RNA, 19 nt, synthetic construct
  source 1..19: mol_type = other RNA
tatttggttttgatgattc

SEQ ID NO: 2275 - RNA, 19 nt, synthetic construct
  source 1..19: mol_type = other RNA
atatttggttttgatgatt

SEQ ID NO: 2276 - RNA, 19 nt, synthetic construct
  source 1..19: mol_type = other RNA
catatttggttttgatgat

SEQ ID NO: 2277 - RNA, 19 nt, synthetic construct
  source 1..19: mol_type = other RNA
tcatatttggttttgatga

SEQ ID NO: 2278 - RNA, 19 nt, synthetic construct
  source 1..19: mol_type = other RNA
atcatatttggttttgatg

SEQ ID NO: 2279 - RNA, 19 nt, synthetic construct
  source 1..19: mol_type = other RNA
tatcatatttggttttgat

SEQ ID NO: 2280 - RNA, 19 nt, synthetic construct
  source 1..19: mol_type = other RNA
ctatcatatttggttttga

SEQ ID NO: 2281 - RNA, 19 nt, synthetic construct
  source 1..19: mol_type = other RNA
tctatcatatttggttttg

SEQ ID NO: 2282 - RNA, 19 nt, synthetic construct
  source 1..19: mol_type = other RNA
gtctatcatatttggtttt

SEQ ID NO: 2283 - RNA, 19 nt, synthetic construct
  source 1..19: mol_type = other RNA
cgtctatcatatttggttt

SEQ ID NO: 2284 - RNA, 19 nt, synthetic construct
  source 1..19: mol_type = other RNA
gcgtctatcatatttggtt

SEQ ID NO: 2285 - RNA, 19 nt, synthetic construct
  source 1..19: mol_type = other RNA
agcgtctatcatatttggt

SEQ ID NO: 2286 - RNA, 19 nt, synthetic construct
  source 1..19: mol_type = other RNA
cagcgtctatcatatttgg

SEQ ID NO: 2287 - RNA, 19 nt, synthetic construct
  source 1..19: mol_type = other RNA
gcagcgtctatcatatttg

SEQ ID NO: 2288 - RNA, 19 nt, synthetic construct
  source 1..19: mol_type = other RNA
agcagcgtctatcatattt

SEQ ID NO: 2289 - RNA, 19 nt, synthetic construct
  source 1..19: mol_type = other RNA
tagcagcgtctatcatatt

SEQ ID NO: 2290 - RNA, 19 nt, synthetic construct
  source 1..19: mol_type = other RNA
gtagcagcgtctatcatat

SEQ ID NO: 2291 - RNA, 19 nt, synthetic construct
  source 1..19: mol_type = other RNA
agtagcagcgtctatcata

SEQ ID NO: 2292 - RNA, 19 nt, synthetic construct
  source 1..19: mol_type = other RNA
aagtagcagcgtctatcat

SEQ ID NO: 2293 - RNA, 19 nt, synthetic construct
  source 1..19: mol_type = other RNA
aaagtagcagcgtctatca

SEQ ID NO: 2294 - RNA, 19 nt, synthetic construct
  source 1..19: mol_type = other RNA
caaagtagcagcgtctatc

SEQ ID NO: 2295 - RNA, 19 nt, synthetic construct
  source 1..19: mol_type = other RNA
tcaaagtagcagcgtctat

SEQ ID NO: 2296 - RNA, 19 nt, synthetic construct
  source 1..19: mol_type = other RNA
ttcaaagtagcagcgtcta

SEQ ID NO: 2297 - RNA, 19 nt, synthetic construct
  source 1..19: mol_type = other RNA
cttcaaagtagcagcgtct

SEQ ID NO: 2298 - RNA, 19 nt, synthetic construct
  source 1..19: mol_type = other RNA
acttcaaagtagcagcgtc

SEQ ID NO: 2299 - RNA, 19 nt, synthetic construct
  source 1..19: mol_type = other RNA
gacttcaaagtagcagcgt

SEQ ID NO: 2300 - RNA, 19 nt, synthetic construct
  source 1..19: mol_type = other RNA
ggacttcaaagtagcagcg

SEQ ID NO: 2301 - RNA, 19 nt, synthetic construct
  source 1..19: mol_type = other RNA
tggacttcaaagtagcagc

SEQ ID NO: 2302 - RNA, 19 nt, synthetic construct
  source 1..19: mol_type = other RNA
ctggacttcaaagtagcag

SEQ ID NO: 2303 - RNA, 19 nt, synthetic construct
  source 1..19: mol_type = other RNA
cctggacttcaaagtagca

SEQ ID NO: 2304 - RNA, 19 nt, synthetic construct
  source 1..19: mol_type = other RNA
tcctggacttcaaagtagc

SEQ ID NO: 2305 - RNA, 19 nt, synthetic construct
  source 1..19: mol_type = other RNA
ttcctggacttcaaagtag

SEQ ID NO: 2306 - RNA, 19 nt, synthetic construct
  source 1..19: mol_type = other RNA
tttcctggacttcaaagta

SEQ ID NO: 2307 - RNA, 19 nt, synthetic construct
  source 1..19: mol_type = other RNA
ttttcctggacttcaaagt

SEQ ID NO: 2308 - RNA, 19 nt, synthetic construct
  source 1..19: mol_type = other RNA
attttcctggacttcaaag

SEQ ID NO: 2309 - RNA, 19 nt, synthetic construct
  source 1..19: mol_type = other RNA
cattttcctggacttcaaa

SEQ ID NO: 2310 - RNA, 19 nt, synthetic construct
  source 1..19: mol_type = other RNA
acattttcctggacttcaa

SEQ ID NO: 2311 - RNA, 19 nt, synthetic construct
  source 1..19: mol_type = other RNA
aacattttcctggacttca

SEQ ID NO: 2312 - RNA, 19 nt, synthetic construct
  source 1..19: mol_type = other RNA
taacattttcctggacttc

SEQ ID NO: 2313 - RNA, 19 nt, synthetic construct
  source 1..19: mol_type = other RNA
ctaacattttcctggactt

SEQ ID NO: 2314 - RNA, 19 nt, synthetic construct
  source 1..19: mol_type = other RNA
tctaacattttcctggact

SEQ ID NO: 2315 - RNA, 19 nt, synthetic construct
  source 1..19: mol_type = other RNA
ttctaacattttcctggac

SEQ ID NO: 2316 - RNA, 19 nt, synthetic construct
  source 1..19: mol_type = other RNA
cttctaacattttcctgga

SEQ ID NO: 2317 - RNA, 19 nt, synthetic construct
  source 1..19: mol_type = other RNA
tcttctaacattttcctgg

SEQ ID NO: 2318 - RNA, 19 nt, synthetic construct
  source 1..19: mol_type = other RNA
ttcttctaacattttcctg

SEQ ID NO: 2319 - RNA, 19 nt, synthetic construct
  source 1..19: mol_type = other RNA
tttcttctaacattttcct

SEQ ID NO: 2320 - RNA, 19 nt, synthetic construct
  source 1..19: mol_type = other RNA
atttcttctaacattttcc

SEQ ID NO: 2321 - RNA, 19 nt, synthetic construct
  source 1..19: mol_type = other RNA
aatttcttctaacattttc

SEQ ID NO: 2322 - RNA, 19 nt, synthetic construct
  source 1..19: mol_type = other RNA
taatttcttctaacatttt

SEQ ID NO: 2323 - RNA, 19 nt, synthetic construct
  source 1..19: mol_type = other RNA
ataatttcttctaacattt

SEQ ID NO: 2324 - RNA, 19 nt, synthetic construct
  source 1..19: mol_type = other RNA
cataatttcttctaacatt

SEQ ID NO: 2325 - RNA, 19 nt, synthetic construct
  source 1..19: mol_type = other RNA
tcataatttcttctaacat

SEQ ID NO: 2326 - RNA, 19 nt, synthetic construct
  source 1..19: mol_type = other RNA
ttcataatttcttctaaca

SEQ ID NO: 2327 - RNA, 19 nt, synthetic construct
  source 1..19: mol_type = other RNA
tttcataatttcttctaac

SEQ ID NO: 2328 - RNA, 19 nt, synthetic construct
  source 1..19: mol_type = other RNA
atttcataatttcttctaa

SEQ ID NO: 2329 - RNA, 19 nt, synthetic construct
  source 1..19: mol_type = other RNA
tatttcataatttcttcta

SEQ ID NO: 2330 - RNA, 19 nt, synthetic construct
  source 1..19: mol_type = other RNA
atatttcataatttcttct

SEQ ID NO: 2331 - RNA, 19 nt, synthetic construct
  source 1..19: mol_type = other RNA
catatttcataatttcttc

SEQ ID NO: 2332 - RNA, 19 nt, synthetic construct
  source 1..19: mol_type = other RNA
tcatatttcataatttctt

SEQ ID NO: 2333 - RNA, 19 nt, synthetic construct
  source 1..19: mol_type = other RNA
ttcatatttcataatttct

SEQ ID NO: 2334 - RNA, 19 nt, synthetic construct
  source 1..19: mol_type = other RNA
cttcatatttcataatttc

SEQ ID NO: 2335 - RNA, 19 nt, synthetic construct
  source 1..19: mol_type = other RNA
gcttcatatttcataattt

SEQ ID NO: 2336 - RNA, 19 nt, synthetic construct
  source 1..19: mol_type = other RNA
tgcttcatatttcataatt

SEQ ID NO: 2337 - RNA, 19 nt, synthetic construct
  source 1..19: mol_type = other RNA
atgcttcatatttcataat

SEQ ID NO: 2338 - RNA, 19 nt, synthetic construct
  source 1..19: mol_type = other RNA
gatgcttcatatttcataa

SEQ ID NO: 2339 - RNA, 19 nt, synthetic construct
  source 1..19: mol_type = other RNA
cgatgcttcatatttcata

SEQ ID NO: 2340 - RNA, 19 nt, synthetic construct
  source 1..19: mol_type = other RNA
tcgatgcttcatatttcat

SEQ ID NO: 2341 - RNA, 19 nt, synthetic construct
  source 1..19: mol_type = other RNA
atcgatgcttcatatttca

SEQ ID NO: 2342 - RNA, 19 nt, synthetic construct
  source 1..19: mol_type = other RNA
aatcgatgcttcatatttc

SEQ ID NO: 2343 - RNA, 19 nt, synthetic construct
  source 1..19: mol_type = other RNA
aaatcgatgcttcatattt

SEQ ID NO: 2344 - RNA, 19 nt, synthetic construct
  source 1..19: mol_type = other RNA
aaaatcgatgcttcatatt

SEQ ID NO: 2345 - RNA, 19 nt, synthetic construct
  source 1..19: mol_type = other RNA
taaaatcgatgcttcatat

SEQ ID NO: 2346 - RNA, 19 nt, synthetic construct
  source 1..19: mol_type = other RNA
ttaaaatcgatgcttcata

SEQ ID NO: 2347 - RNA, 19 nt, synthetic construct
  source 1..19: mol_type = other RNA
gttaaaatcgatgcttcat

SEQ ID NO: 2348 - RNA, 19 nt, synthetic construct
  source 1..19: mol_type = other RNA
tgttaaaatcgatgcttca

SEQ ID NO: 2349 - RNA, 19 nt, synthetic construct
  source 1..19: mol_type = other RNA
gtgttaaaatcgatgcttc

SEQ ID NO: 2350 - RNA, 19 nt, synthetic construct
  source 1..19: mol_type = other RNA
tgtgttaaaatcgatgctt

SEQ ID NO: 2351 - RNA, 19 nt, synthetic construct
  source 1..19: mol_type = other RNA
atgtgttaaaatcgatgct

SEQ ID NO: 2352 - RNA, 19 nt, synthetic construct
  source 1..19: mol_type = other RNA
catgtgttaaaatcgatgc

SEQ ID NO: 2353 - RNA, 19 nt, synthetic construct
  source 1..19: mol_type = other RNA
tcatgtgttaaaatcgatg

SEQ ID NO: 2354 - RNA, 19 nt, synthetic construct
  source 1..19: mol_type = other RNA
gtcatgtgttaaaatcgat

SEQ ID NO: 2355 - RNA, 19 nt, synthetic construct
  source 1..19: mol_type = other RNA
agtcatgtgttaaaatcga

SEQ ID NO: 2356 - RNA, 19 nt, synthetic construct
  source 1..19: mol_type = other RNA
gagtcatgtgttaaaatcg

SEQ ID NO: 2357 - RNA, 19 nt, synthetic construct
  source 1..19: mol_type = other RNA
tgagtcatgtgttaaaatc

SEQ ID NO: 2358 - RNA, 19 nt, synthetic construct
  source 1..19: mol_type = other RNA
ttgagtcatgtgttaaaat

SEQ ID NO: 2359 - RNA, 19 nt, synthetic construct
  source 1..19: mol_type = other RNA
cttgagtcatgtgttaaaa

SEQ ID NO: 2360 - RNA, 19 nt, synthetic construct
  source 1..19: mol_type = other RNA
acttgagtcatgtgttaaa

SEQ ID NO: 2361 - RNA, 19 nt, synthetic construct
  source 1..19: mol_type = other RNA
tacttgagtcatgtgttaa

SEQ ID NO: 2362 - RNA, 19 nt, synthetic construct
  source 1..19: mol_type = other RNA
atacttgagtcatgtgtta

SEQ ID NO: 2363 - RNA, 19 nt, synthetic construct
  source 1..19: mol_type = other RNA
aatacttgagtcatgtgtt

SEQ ID NO: 2364 - RNA, 19 nt, synthetic construct
  source 1..19: mol_type = other RNA
gaatacttgagtcatgtgt

SEQ ID NO: 2365 - RNA, 19 nt, synthetic construct
  source 1..19: mol_type = other RNA
cgaatacttgagtcatgtg

SEQ ID NO: 2366 - RNA, 19 nt, synthetic construct
  source 1..19: mol_type = other RNA
tcgaatacttgagtcatgt

SEQ ID NO: 2367 - RNA, 19 nt, synthetic construct
  source 1..19: mol_type = other RNA
atcgaatacttgagtcatg

SEQ ID NO: 2368 - RNA, 19 nt, synthetic construct
  source 1..19: mol_type = other RNA
tatcgaatacttgagtcat

SEQ ID NO: 2369 - RNA, 19 nt, synthetic construct
  source 1..19: mol_type = other RNA
atatcgaatacttgagtca

SEQ ID NO: 2370 - RNA, 19 nt, synthetic construct
  source 1..19: mol_type = other RNA
aatatcgaatacttgagtc

SEQ ID NO: 2371 - RNA, 19 nt, synthetic construct
  source 1..19: mol_type = other RNA
aaatatcgaatacttgagt

SEQ ID NO: 2372 - RNA, 19 nt, synthetic construct
  source 1..19: mol_type = other RNA
caaatatcgaatacttgag

SEQ ID NO: 2373 - RNA, 19 nt, synthetic construct
  source 1..19: mol_type = other RNA
gcaaatatcgaatacttga

SEQ ID NO: 2374 - RNA, 19 nt, synthetic construct
  source 1..19: mol_type = other RNA
tgcaaatatcgaatacttg

SEQ ID NO: 2375 - RNA, 19 nt, synthetic construct
  source 1..19: mol_type = other RNA
ctgcaaatatcgaatactt

SEQ ID NO: 2376 - RNA, 19 nt, synthetic construct
  source 1..19: mol_type = other RNA
cctgcaaatatcgaatact

SEQ ID NO: 2377 - RNA, 19 nt, synthetic construct
  source 1..19: mol_type = other RNA
tcctgcaaatatcgaatac

SEQ ID NO: 2378 - RNA, 19 nt, synthetic construct
  source 1..19: mol_type = other RNA
ttcctgcaaatatcgaata

SEQ ID NO: 2379 - RNA, 19 nt, synthetic construct
  source 1..19: mol_type = other RNA
tttcctgcaaatatcgaat

SEQ ID NO: 2380 - RNA, 19 nt, synthetic construct
  source 1..19: mol_type = other RNA
atttcctgcaaatatcgaa

SEQ ID NO: 2381 - RNA, 19 nt, synthetic construct
  source 1..19: mol_type = other RNA
tatttcctgcaaatatcga

SEQ ID NO: 2382 - RNA, 19 nt, synthetic construct
  source 1..19: mol_type = other RNA
atatttcctgcaaatatcg

SEQ ID NO: 2383 - RNA, 19 nt, synthetic construct
  source 1..19: mol_type = other RNA
tatatttcctgcaaatatc

SEQ ID NO: 2384 - RNA, 19 nt, synthetic construct
  source 1..19: mol_type = other RNA
atatatttcctgcaaatat

SEQ ID NO: 2385 - RNA, 19 nt, synthetic construct
  source 1..19: mol_type = other RNA
tatatatttcctgcaaata

SEQ ID NO: 2386 - RNA, 19 nt, synthetic construct
  source 1..19: mol_type = other RNA
ttatatatttcctgcaaat

SEQ ID NO: 2387 - RNA, 19 nt, synthetic construct
  source 1..19: mol_type = other RNA
attatatatttcctgcaaa

SEQ ID NO: 2388 - RNA, 19 nt, synthetic construct
  source 1..19: mol_type = other RNA
aattatatatttcctgcaa

SEQ ID NO: 2389 - RNA, 19 nt, synthetic construct
  source 1..19: mol_type = other RNA
gaattatatatttcctgca

SEQ ID NO: 2390 - RNA, 19 nt, synthetic construct
  source 1..19: mol_type = other RNA
tgaattatatatttcctgc

SEQ ID NO: 2391 - RNA, 19 nt, synthetic construct
  source 1..19: mol_type = other RNA
ttgaattatatatttcctg

SEQ ID NO: 2392 - RNA, 19 nt, synthetic construct
  source 1..19: mol_type = other RNA
tttgaattatatatttcct

SEQ ID NO: 2393 - RNA, 19 nt, synthetic construct
  source 1..19: mol_type = other RNA
atttgaattatatatttcc

SEQ ID NO: 2394 - RNA, 19 nt, synthetic construct
  source 1..19: mol_type = other RNA
tatttgaattatatatttc

SEQ ID NO: 2395 - RNA, 19 nt, synthetic construct
  source 1..19: mol_type = other RNA
ttatttgaattatatattt

SEQ ID NO: 2396 - RNA, 19 nt, synthetic construct
  source 1..19: mol_type = other RNA
attatttgaattatatatt

SEQ ID NO: 2397 - RNA, 19 nt, synthetic construct
  source 1..19: mol_type = other RNA
gattatttgaattatatat

SEQ ID NO: 2398 - RNA, 19 nt, synthetic construct
  source 1..19: mol_type = other RNA
tgattatttgaattatata

SEQ ID NO: 2399 - RNA, 19 nt, synthetic construct
  source 1..19: mol_type = other RNA
ttgattatttgaattatat

SEQ ID NO: 2400 - RNA, 19 nt, synthetic construct
  source 1..19: mol_type = other RNA
tttgattatttgaattata

SEQ ID NO: 2401 - RNA, 19 nt, synthetic construct
  source 1..19: mol_type = other RNA
ttttgattatttgaattat

SEQ ID NO: 2402 - RNA, 19 nt, synthetic construct
  source 1..19: mol_type = other RNA
cttttgattatttgaatta

SEQ ID NO: 2403 - RNA, 19 nt, synthetic construct
  source 1..19: mol_type = other RNA
tcttttgattatttgaatt

SEQ ID NO: 2404 - RNA, 19 nt, synthetic construct
  source 1..19: mol_type = other RNA
atcttttgattatttgaat

SEQ ID NO: 2405 - RNA, 19 nt, synthetic construct
  source 1..19: mol_type = other RNA
aatcttttgattatttgaa

SEQ ID NO: 2406 - RNA, 19 nt, synthetic construct
  source 1..19: mol_type = other RNA
caatcttttgattatttga

SEQ ID NO: 2407 - RNA, 19 nt, synthetic construct
  source 1..19: mol_type = other RNA
acaatcttttgattatttg

SEQ ID NO: 2408 - RNA, 19 nt, synthetic construct
  source 1..19: mol_type = other RNA
aacaatcttttgattattt

SEQ ID NO: 2409 - RNA, 19 nt, synthetic construct
  source 1..19: mol_type = other RNA
taacaatcttttgattatt

SEQ ID NO: 2410 - RNA, 19 nt, synthetic construct
  source 1..19: mol_type = other RNA
ttaacaatcttttgattat

SEQ ID NO: 2411 - RNA, 19 nt, synthetic construct
  source 1..19: mol_type = other RNA
gttaacaatcttttgatta

SEQ ID NO: 2412 - RNA, 19 nt, synthetic construct
  source 1..19: mol_type = other RNA
ggttaacaatcttttgatt

SEQ ID NO: 2413 - RNA, 19 nt, synthetic construct
  source 1..19: mol_type = other RNA
aggttaacaatcttttgat

SEQ ID NO: 2414 - RNA, 19 nt, synthetic construct
  source 1..19: mol_type = other RNA
caggttaacaatcttttga

SEQ ID NO: 2415 - RNA, 19 nt, synthetic construct
  source 1..19: mol_type = other RNA
tcaggttaacaatcttttg

SEQ ID NO: 2416 - RNA, 19 nt, synthetic construct
  source 1..19: mol_type = other RNA
ttcaggttaacaatctttt

SEQ ID NO: 2417 - RNA, 19 nt, synthetic construct
  source 1..19: mol_type = other RNA
tttcaggttaacaatcttt

SEQ ID NO: 2418 - RNA, 19 nt, synthetic construct
  source 1..19: mol_type = other RNA
ctttcaggttaacaatctt

SEQ ID NO: 2419 - RNA, 19 nt, synthetic construct
  source 1..19: mol_type = other RNA
tctttcaggttaacaatct

SEQ ID NO: 2420 - RNA, 19 nt, synthetic construct
  source 1..19: mol_type = other RNA
ctctttcaggttaacaatc

SEQ ID NO: 2421 - RNA, 19 nt, synthetic construct
  source 1..19: mol_type = other RNA
tctctttcaggttaacaat

SEQ ID NO: 2422 - RNA, 19 nt, synthetic construct
  source 1..19: mol_type = other RNA
ttctctttcaggttaacaa

SEQ ID NO: 2423 - RNA, 19 nt, synthetic construct
  source 1..19: mol_type = other RNA
cttctctttcaggttaaca

SEQ ID NO: 2424 - RNA, 19 nt, synthetic construct
  source 1..19: mol_type = other RNA
ccttctctttcaggttaac

SEQ ID NO: 2425 - RNA, 19 nt, synthetic construct
  source 1..19: mol_type = other RNA
accttctctttcaggttaa

SEQ ID NO: 2426 - RNA, 19 nt, synthetic construct
  source 1..19: mol_type = other RNA
taccttctctttcaggtta

SEQ ID NO: 2427 - RNA, 19 nt, synthetic construct
  source 1..19: mol_type = other RNA
ctaccttctctttcaggtt

SEQ ID NO: 2428 - RNA, 19 nt, synthetic construct
  source 1..19: mol_type = other RNA
gctaccttctctttcaggt

SEQ ID NO: 2429 - RNA, 19 nt, synthetic construct
  source 1..19: mol_type = other RNA
ggctaccttctctttcagg

SEQ ID NO: 2430 - RNA, 19 nt, synthetic construct
  source 1..19: mol_type = other RNA
gggctaccttctctttcag

SEQ ID NO: 2431 - RNA, 19 nt, synthetic construct
  source 1..19: mol_type = other RNA
tgggctaccttctctttca

SEQ ID NO: 2432 - RNA, 19 nt, synthetic construct
  source 1..19: mol_type = other RNA
ctgggctaccttctctttc

SEQ ID NO: 2433 - RNA, 19 nt, synthetic construct
  source 1..19: mol_type = other RNA
gctgggctaccttctcttt

SEQ ID NO: 2434 - RNA, 19 nt, synthetic construct
  source 1..19: mol_type = other RNA
agctgggctaccttctctt

SEQ ID NO: 2435 - RNA, 19 nt, synthetic construct
  source 1..19: mol_type = other RNA
aagctgggctaccttctct

SEQ ID NO: 2436 - RNA, 19 nt, synthetic construct
  source 1..19: mol_type = other RNA
caagctgggctaccttctc

SEQ ID NO: 2437 - RNA, 19 nt, synthetic construct
  source 1..19: mol_type = other RNA
tcaagctgggctaccttct

SEQ ID NO: 2438 - RNA, 19 nt, synthetic construct
  source 1..19: mol_type = other RNA
ttcaagctgggctaccttc

SEQ ID NO: 2439 - RNA, 19 nt, synthetic construct
  source 1..19: mol_type = other RNA
cttcaagctgggctacctt

SEQ ID NO: 2440 - RNA, 19 nt, synthetic construct
  source 1..19: mol_type = other RNA
gcttcaagctgggctacct

SEQ ID NO: 2441 - RNA, 19 nt, synthetic construct
  source 1..19: mol_type = other RNA
tgcttcaagctgggctacc

SEQ ID NO: 2442 - RNA, 19 nt, synthetic construct
  source 1..19: mol_type = other RNA
gtgcttcaagctgggctac

SEQ ID NO: 2443 - RNA, 19 nt, synthetic construct
  source 1..19: mol_type = other RNA
tgtgcttcaagctgggcta

SEQ ID NO: 2444 - RNA, 19 nt, synthetic construct
  source 1..19: mol_type = other RNA
ctgtgcttcaagctgggct

SEQ ID NO: 2445 - RNA, 19 nt, synthetic construct
  source 1..19: mol_type = other RNA
actgtgcttcaagctgggc

SEQ ID NO: 2446 - RNA, 19 nt, synthetic construct
  source 1..19: mol_type = other RNA
cactgtgcttcaagctggg

SEQ ID NO: 2447 - RNA, 19 nt, synthetic construct
  source 1..19: mol_type = other RNA
gcactgtgcttcaagctgg

SEQ ID NO: 2448 - RNA, 19 nt, synthetic construct
  source 1..19: mol_type = other RNA
ggcactgtgcttcaagctg

SEQ ID NO: 2449 - RNA, 19 nt, synthetic construct
  source 1..19: mol_type = other RNA
tggcactgtgcttcaagct

SEQ ID NO: 2450 - RNA, 19 nt, synthetic construct
  source 1..19: mol_type = other RNA
ctggcactgtgcttcaagc

SEQ ID NO: 2451 - RNA, 19 nt, synthetic construct
  source 1..19: mol_type = other RNA
cctggcactgtgcttcaag

SEQ ID NO: 2452 - RNA, 19 nt, synthetic construct
  source 1..19: mol_type = other RNA
tcctggcactgtgcttcaa

SEQ ID NO: 2453 - RNA, 19 nt, synthetic construct
  source 1..19: mol_type = other RNA
ttcctggcactgtgcttca

SEQ ID NO: 2454 - RNA, 19 nt, synthetic construct
  source 1..19: mol_type = other RNA
gttcctggcactgtgcttc

SEQ ID NO: 2455 - RNA, 19 nt, synthetic construct
  source 1..19: mol_type = other RNA
ggttcctggcactgtgctt

SEQ ID NO: 2456 - RNA, 19 nt, synthetic construct
  source 1..19: mol_type = other RNA
aggttcctggcactgtgct

SEQ ID NO: 2457 - RNA, 19 nt, synthetic construct
  source 1..19: mol_type = other RNA
aaggttcctggcactgtgc

SEQ ID NO: 2458 - RNA, 19 nt, synthetic construct
  source 1..19: mol_type = other RNA
caaggttcctggcactgtg

SEQ ID NO: 2459 - RNA, 19 nt, synthetic construct
  source 1..19: mol_type = other RNA
gcaaggttcctggcactgt

SEQ ID NO: 2460 - RNA, 19 nt, synthetic construct
  source 1..19: mol_type = other RNA
tgcaaggttcctggcactg

SEQ ID NO: 2461 - RNA, 19 nt, synthetic construct
  source 1..19: mol_type = other RNA
ttgcaaggttcctggcact

SEQ ID NO: 2462 - RNA, 19 nt, synthetic construct
  source 1..19: mol_type = other RNA
tttgcaaggttcctggcac

SEQ ID NO: 2463 - RNA, 19 nt, synthetic construct
  source 1..19: mol_type = other RNA
ctttgcaaggttcctggca

SEQ ID NO: 2464 - RNA, 19 nt, synthetic construct
  source 1..19: mol_type = other RNA
tctttgcaaggttcctggc

SEQ ID NO: 2465 - RNA, 19 nt, synthetic construct
  source 1..19: mol_type = other RNA
gtctttgcaaggttcctgg

SEQ ID NO: 2466 - RNA, 19 nt, synthetic construct
  source 1..19: mol_type = other RNA
tgtctttgcaaggttcctg

SEQ ID NO: 2467 - RNA, 19 nt, synthetic construct
  source 1..19: mol_type = other RNA
gtgtctttgcaaggttcct

SEQ ID NO: 2468 - RNA, 19 nt, synthetic construct
  source 1..19: mol_type = other RNA
cgtgtctttgcaaggttcc

SEQ ID NO: 2469 - RNA, 19 nt, synthetic construct
  source 1..19: mol_type = other RNA
ccgtgtctttgcaaggttc

SEQ ID NO: 2470 - RNA, 19 nt, synthetic construct
  source 1..19: mol_type = other RNA
accgtgtctttgcaaggtt

SEQ ID NO: 2471 - RNA, 19 nt, synthetic construct
  source 1..19: mol_type = other RNA
caccgtgtctttgcaaggt

SEQ ID NO: 2472 - RNA, 19 nt, synthetic construct
  source 1..19: mol_type = other RNA
gcaccgtgtctttgcaagg

SEQ ID NO: 2473 - RNA, 19 nt, synthetic construct
  source 1..19: mol_type = other RNA
tgcaccgtgtctttgcaag

SEQ ID NO: 2474 - RNA, 19 nt, synthetic construct
  source 1..19: mol_type = other RNA
ttgcaccgtgtctttgcaa

SEQ ID NO: 2475 - RNA, 19 nt, synthetic construct
  source 1..19: mol_type = other RNA
tttgcaccgtgtctttgca

SEQ ID NO: 2476 - RNA, 19 nt, synthetic construct
  source 1..19: mol_type = other RNA
atttgcaccgtgtctttgc

SEQ ID NO: 2477 - RNA, 19 nt, synthetic construct
  source 1..19: mol_type = other RNA
gatttgcaccgtgtctttg

SEQ ID NO: 2478 - RNA, 19 nt, synthetic construct
  source 1..19: mol_type = other RNA
ggatttgcaccgtgtcttt

SEQ ID NO: 2479 - RNA, 19 nt, synthetic construct
  source 1..19: mol_type = other RNA
tggatttgcaccgtgtctt

SEQ ID NO: 2480 - RNA, 19 nt, synthetic construct
  source 1..19: mol_type = other RNA
atggatttgcaccgtgtct

SEQ ID NO: 2481 - RNA, 19 nt, synthetic construct
  source 1..19: mol_type = other RNA
catggatttgcaccgtgtc

SEQ ID NO: 2482 - RNA, 19 nt, synthetic construct
  source 1..19: mol_type = other RNA
tcatggatttgcaccgtgt

SEQ ID NO: 2483 - RNA, 19 nt, synthetic construct
  source 1..19: mol_type = other RNA
atcatggatttgcaccgtg

SEQ ID NO: 2484 - RNA, 19 nt, synthetic construct
  source 1..19: mol_type = other RNA
tatcatggatttgcaccgt

SEQ ID NO: 2485 - RNA, 19 nt, synthetic construct
  source 1..19: mol_type = other RNA
atatcatggatttgcaccg

SEQ ID NO: 2486 - RNA, 19 nt, synthetic construct
  source 1..19: mol_type = other RNA
gatatcatggatttgcacc

SEQ ID NO: 2487 - RNA, 19 nt, synthetic construct
  source 1..19: mol_type = other RNA
tgatatcatggatttgcac

SEQ ID NO: 2488 - RNA, 19 nt, synthetic construct
  source 1..19: mol_type = other RNA
gtgatatcatggatttgca

SEQ ID NO: 2489 - RNA, 19 nt, synthetic construct
  source 1..19: mol_type = other RNA
agtgatatcatggatttgc

SEQ ID NO: 2490 - RNA, 19 nt, synthetic construct
  source 1..19: mol_type = other RNA
cagtgatatcatggatttg

SEQ ID NO: 2491 - RNA, 19 nt, synthetic construct
  source 1..19: mol_type = other RNA
ccagtgatatcatggattt

SEQ ID NO: 2492 - RNA, 19 nt, synthetic construct
  source 1..19: mol_type = other RNA
cccagtgatatcatggatt

SEQ ID NO: 2493 - RNA, 19 nt, synthetic construct
  source 1..19: mol_type = other RNA
tcccagtgatatcatggat

SEQ ID NO: 2494 - RNA, 19 nt, synthetic construct
  source 1..19: mol_type = other RNA
ttcccagtgatatcatgga

SEQ ID NO: 2495 - RNA, 19 nt, synthetic construct
  source 1..19: mol_type = other RNA
tttcccagtgatatcatgg

SEQ ID NO: 2496 - RNA, 19 nt, synthetic construct
  source 1..19: mol_type = other RNA
ctttcccagtgatatcatg

SEQ ID NO: 2497 - RNA, 19 nt, synthetic construct
  source 1..19: mol_type = other RNA
tctttcccagtgatatcat

SEQ ID NO: 2498 - RNA, 19 nt, synthetic construct
  source 1..19: mol_type = other RNA
atctttcccagtgatatca

SEQ ID NO: 2499 - RNA, 19 nt, synthetic construct
  source 1..19: mol_type = other RNA
aatctttcccagtgatatc

SEQ ID NO: 2500 - RNA, 19 nt, synthetic construct
  source 1..19: mol_type = other RNA
caatctttcccagtgatat

SEQ ID NO: 2501 - RNA, 19 nt, synthetic construct
  source 1..19: mol_type = other RNA
acaatctttcccagtgata

SEQ ID NO: 2502 - RNA, 19 nt, synthetic construct
  source 1..19: mol_type = other RNA
gacaatctttcccagtgat

SEQ ID NO: 2503 - RNA, 19 nt, synthetic construct
  source 1..19: mol_type = other RNA
tgacaatctttcccagtga

SEQ ID NO: 2504 - RNA, 19 nt, synthetic construct
  source 1..19: mol_type = other RNA
ttgacaatctttcccagtg

SEQ ID NO: 2505 - RNA, 19 nt, synthetic construct
  source 1..19: mol_type = other RNA
cttgacaatctttcccagt

SEQ ID NO: 2506 - RNA, 19 nt, synthetic construct
  source 1..19: mol_type = other RNA
tcttgacaatctttcccag

SEQ ID NO: 2507 - RNA, 19 nt, synthetic construct
  source 1..19: mol_type = other RNA
gtcttgacaatctttccca

SEQ ID NO: 2508 - RNA, 19 nt, synthetic construct
  source 1..19: mol_type = other RNA
tgtcttgacaatctttccc

SEQ ID NO: 2509 - RNA, 19 nt, synthetic construct
  source 1..19: mol_type = other RNA
atgtcttgacaatctttcc

SEQ ID NO: 2510 - RNA, 19 nt, synthetic construct
  source 1..19: mol_type = other RNA
aatgtcttgacaatctttc

SEQ ID NO: 2511 - RNA, 19 nt, synthetic construct
  source 1..19: mol_type = other RNA
caatgtcttgacaatcttt

SEQ ID NO: 2512 - RNA, 19 nt, synthetic construct
  source 1..19: mol_type = other RNA
gcaatgtcttgacaatctt

SEQ ID NO: 2513 - RNA, 19 nt, synthetic construct
  source 1..19: mol_type = other RNA
ggcaatgtcttgacaatct

SEQ ID NO: 2514 - RNA, 19 nt, synthetic construct
  source 1..19: mol_type = other RNA
tggcaatgtcttgacaatc

SEQ ID NO: 2515 - RNA, 19 nt, synthetic construct
  source 1..19: mol_type = other RNA
ttggcaatgtcttgacaat

SEQ ID NO: 2516 - RNA, 19 nt, synthetic construct
  source 1..19: mol_type = other RNA
attggcaatgtcttgacaa

SEQ ID NO: 2517 - RNA, 19 nt, synthetic construct
  source 1..19: mol_type = other RNA
tattggcaatgtcttgaca

SEQ ID NO: 2518 - RNA, 19 nt, synthetic construct
  source 1..19: mol_type = other RNA
ttattggcaatgtcttgac

SEQ ID NO: 2519 - RNA, 19 nt, synthetic construct
  source 1..19: mol_type = other RNA
cttattggcaatgtcttga

SEQ ID NO: 2520 - RNA, 19 nt, synthetic construct
  source 1..19: mol_type = other RNA
ccttattggcaatgtcttg

SEQ ID NO: 2521 - RNA, 19 nt, synthetic construct
  source 1..19: mol_type = other RNA
cccttattggcaatgtctt

SEQ ID NO: 2522 - RNA, 19 nt, synthetic construct
  source 1..19: mol_type = other RNA
tcccttattggcaatgtct

SEQ ID NO: 2523 - RNA, 19 nt, synthetic construct
  source 1..19: mol_type = other RNA
ctcccttattggcaatgtc

SEQ ID NO: 2524 - RNA, 19 nt, synthetic construct
  source 1..19: mol_type = other RNA
gctcccttattggcaatgt

SEQ ID NO: 2525 - RNA, 19 nt, synthetic construct
  source 1..19: mol_type = other RNA
agctcccttattggcaatg

SEQ ID NO: 2526 - RNA, 19 nt, synthetic construct
  source 1..19: mol_type = other RNA
tagctcccttattggcaat

SEQ ID NO: 2527 - RNA, 19 nt, synthetic construct
  source 1..19: mol_type = other RNA
ttagctcccttattggcaa

SEQ ID NO: 2528 - RNA, 19 nt, synthetic construct
  source 1..19: mol_type = other RNA
tttagctcccttattggca

SEQ ID NO: 2529 - RNA, 19 nt, synthetic construct
  source 1..19: mol_type = other RNA
gtttagctcccttattggc

SEQ ID NO: 2530 - RNA, 19 nt, synthetic construct
  source 1..19: mol_type = other RNA
tgtttagctcccttattgg

SEQ ID NO: 2531 - RNA, 19 nt, synthetic construct
  source 1..19: mol_type = other RNA
ctgtttagctcccttattg

SEQ ID NO: 2532 - RNA, 19 nt, synthetic construct
  source 1..19: mol_type = other RNA
tctgtttagctcccttatt

SEQ ID NO: 2533 - RNA, 19 nt, synthetic construct
  source 1..19: mol_type = other RNA
ctctgtttagctcccttat

SEQ ID NO: 2534 - RNA, 19 nt, synthetic construct
  source 1..19: mol_type = other RNA
gctctgtttagctccctta

SEQ ID NO: 2535 - RNA, 19 nt, synthetic construct
  source 1..19: mol_type = other RNA
cgctctgtttagctccctt

SEQ ID NO: 2536 - RNA, 19 nt, synthetic construct
  source 1..19: mol_type = other RNA
ccgctctgtttagctccct

SEQ ID NO: 2537 - RNA, 19 nt, synthetic construct
  source 1..19: mol_type = other RNA
cccgctctgtttagctccc

SEQ ID NO: 2538 - RNA, 19 nt, synthetic construct
  source 1..19: mol_type = other RNA
gcccgctctgtttagctcc

SEQ ID NO: 2539 - RNA, 19 nt, synthetic construct
  source 1..19: mol_type = other RNA
agcccgctctgtttagctc

SEQ ID NO: 2540 - RNA, 19 nt, synthetic construct
  source 1..19: mol_type = other RNA
aagcccgctctgtttagct

SEQ ID NO: 2541 - RNA, 19 nt, synthetic construct
  source 1..19: mol_type = other RNA
aaagcccgctctgtttagc

SEQ ID NO: 2542 - RNA, 19 nt, synthetic construct
  source 1..19: mol_type = other RNA
taaagcccgctctgtttag

SEQ ID NO: 2543 - RNA, 19 nt, synthetic construct
  source 1..19: mol_type = other RNA
gtaaagcccgctctgttta

SEQ ID NO: 2544 - RNA, 19 nt, synthetic construct
  source 1..19: mol_type = other RNA
agtaaagcccgctctgttt

SEQ ID NO: 2545 - RNA, 19 nt, synthetic construct
  source 1..19: mol_type = other RNA
aagtaaagcccgctctgtt

SEQ ID NO: 2546 - RNA, 19 nt, synthetic construct
  source 1..19: mol_type = other RNA
aaagtaaagcccgctctgt

SEQ ID NO: 2547 - RNA, 19 nt, synthetic construct
  source 1..19: mol_type = other RNA
taaagtaaagcccgctctg

SEQ ID NO: 2548 - RNA, 19 nt, synthetic construct
  source 1..19: mol_type = other RNA
ataaagtaaagcccgctct

SEQ ID NO: 2549 - RNA, 19 nt, synthetic construct
  source 1..19: mol_type = other RNA
aataaagtaaagcccgctc

SEQ ID NO: 2550 - RNA, 19 nt, synthetic construct
  source 1..19: mol_type = other RNA
taataaagtaaagcccgct

SEQ ID NO: 2551 - RNA, 19 nt, synthetic construct
  source 1..19: mol_type = other RNA
ttaataaagtaaagcccgc

SEQ ID NO: 2552 - RNA, 19 nt, synthetic construct
  source 1..19: mol_type = other RNA
tttaataaagtaaagcccg

SEQ ID NO: 2553 - RNA, 19 nt, synthetic construct
  source 1..19: mol_type = other RNA
gtttaataaagtaaagccc

SEQ ID NO: 2554 - RNA, 19 nt, synthetic construct
  source 1..19: mol_type = other RNA
ggtttaataaagtaaagcc

SEQ ID NO: 2555 - RNA, 19 nt, synthetic construct
  source 1..19: mol_type = other RNA
aggtttaataaagtaaagc

SEQ ID NO: 2556 - RNA, 19 nt, synthetic construct
  source 1..19: mol_type = other RNA
gaggtttaataaagtaaag

SEQ ID NO: 2557 - RNA, 19 nt, synthetic construct
  source 1..19: mol_type = other RNA
agaggtttaataaagtaaa

SEQ ID NO: 2558 - RNA, 19 nt, synthetic construct
  source 1..19: mol_type = other RNA
cagaggtttaataaagtaa

SEQ ID NO: 2559 - RNA, 19 nt, synthetic construct
  source 1..19: mol_type = other RNA
tcagaggtttaataaagta

SEQ ID NO: 2560 - RNA, 19 nt, synthetic construct
  source 1..19: mol_type = other RNA
ttcagaggtttaataaagt

SEQ ID NO: 2561 - RNA, 19 nt, synthetic construct
  source 1..19: mol_type = other RNA
tttcagaggtttaataaag

SEQ ID NO: 2562 - RNA, 19 nt, synthetic construct
  source 1..19: mol_type = other RNA
ctttcagaggtttaataaa

SEQ ID NO: 2563 - RNA, 19 nt, synthetic construct
  source 1..19: mol_type = other RNA
gctttcagaggtttaataa

SEQ ID NO: 2564 - RNA, 19 nt, synthetic construct
  source 1..19: mol_type = other RNA
agctttcagaggtttaata

SEQ ID NO: 2565 - RNA, 19 nt, synthetic construct
  source 1..19: mol_type = other RNA
tagctttcagaggtttaat

SEQ ID NO: 2566 - RNA, 19 nt, synthetic construct
  source 1..19: mol_type = other RNA
ttagctttcagaggtttaa

SEQ ID NO: 2567 - RNA, 19 nt, synthetic construct
  source 1..19: mol_type = other RNA
gttagctttcagaggttta

SEQ ID NO: 2568 - RNA, 19 nt, synthetic construct
  source 1..19: mol_type = other RNA
ggttagctttcagaggttt

SEQ ID NO: 2569 - RNA, 19 nt, synthetic construct
  source 1..19: mol_type = other RNA
tggttagctttcagaggtt

SEQ ID NO: 2570 - RNA, 19 nt, synthetic construct
  source 1..19: mol_type = other RNA
ctggttagctttcagaggt

SEQ ID NO: 2571 - RNA, 19 nt, synthetic construct
  source 1..19: mol_type = other RNA
gctggttagctttcagagg

SEQ ID NO: 2572 - RNA, 19 nt, synthetic construct
  source 1..19: mol_type = other RNA
tgctggttagctttcagag

SEQ ID NO: 2573 - RNA, 19 nt, synthetic construct
  source 1..19: mol_type = other RNA
ttgctggttagctttcaga

SEQ ID NO: 2574 - RNA, 19 nt, synthetic construct
  source 1..19: mol_type = other RNA
attgctggttagctttcag

SEQ ID NO: 2575 - RNA, 19 nt, synthetic construct
  source 1..19: mol_type = other RNA
aattgctggttagctttca

SEQ ID NO: 2576 - RNA, 19 nt, synthetic construct
  source 1..19: mol_type = other RNA
gaattgctggttagctttc

SEQ ID NO: 2577 - RNA, 19 nt, synthetic construct
  source 1..19: mol_type = other RNA
agaattgctggttagcttt

SEQ ID NO: 2578 - RNA, 19 nt, synthetic construct
  source 1..19: mol_type = other RNA
aagaattgctggttagctt

SEQ ID NO: 2579 - RNA, 19 nt, synthetic construct
  source 1..19: mol_type = other RNA
taagaattgctggttagct

SEQ ID NO: 2580 - RNA, 19 nt, synthetic construct
  source 1..19: mol_type = other RNA
ctaagaattgctggttagc

SEQ ID NO: 2581 - RNA, 19 nt, synthetic construct
  source 1..19: mol_type = other RNA
actaagaattgctggttag

SEQ ID NO: 2582 - RNA, 19 nt, synthetic construct
  source 1..19: mol_type = other RNA
gactaagaattgctggtta

SEQ ID NO: 2583 - RNA, 19 nt, synthetic construct
  source 1..19: mol_type = other RNA
agactaagaattgctggtt

SEQ ID NO: 2584 - RNA, 19 nt, synthetic construct
  source 1..19: mol_type = other RNA
tagactaagaattgctggt

SEQ ID NO: 2585 - RNA, 19 nt, synthetic construct
  source 1..19: mol_type = other RNA
gtagactaagaattgctgg

SEQ ID NO: 2586 - RNA, 19 nt, synthetic construct
  source 1..19: mol_type = other RNA
agtagactaagaattgctg

SEQ ID NO: 2587 - RNA, 19 nt, synthetic construct
  source 1..19: mol_type = other RNA
cagtagactaagaattgct

SEQ ID NO: 2588 - RNA, 19 nt, synthetic construct
  source 1..19: mol_type = other RNA
acagtagactaagaattgc

SEQ ID NO: 2589 - RNA, 19 nt, synthetic construct
  source 1..19: mol_type = other RNA
cacagtagactaagaattg

SEQ ID NO: 2590 - RNA, 19 nt, synthetic construct
  source 1..19: mol_type = other RNA
tcacagtagactaagaatt

SEQ ID NO: 2591 - RNA, 19 nt, synthetic construct
  source 1..19: mol_type = other RNA
ttcacagtagactaagaat

SEQ ID NO: 2592 - RNA, 19 nt, synthetic construct
  source 1..19: mol_type = other RNA
tttcacagtagactaagaa

SEQ ID NO: 2593 - RNA, 19 nt, synthetic construct
  source 1..19: mol_type = other RNA
atttcacagtagactaaga

SEQ ID NO: 2594 - RNA, 19 nt, synthetic construct
  source 1..19: mol_type = other RNA
gatttcacagtagactaag

SEQ ID NO: 2595 - RNA, 19 nt, synthetic construct
  source 1..19: mol_type = other RNA
cgatttcacagtagactaa

SEQ ID NO: 2596 - RNA, 19 nt, synthetic construct
  source 1..19: mol_type = other RNA
tcgatttcacagtagacta

SEQ ID NO: 2597 - RNA, 19 nt, synthetic construct
  source 1..19: mol_type = other RNA
atcgatttcacagtagact

SEQ ID NO: 2598 - RNA, 19 nt, synthetic construct
  source 1..19: mol_type = other RNA
catcgatttcacagtagac

SEQ ID NO: 2599 - RNA, 19 nt, synthetic construct
  source 1..19: mol_type = other RNA
ccatcgatttcacagtaga

SEQ ID NO: 2600 - RNA, 19 nt, synthetic construct
  source 1..19: mol_type = other RNA
cccatcgatttcacagtag

SEQ ID NO: 2601 - RNA, 19 nt, synthetic construct
  source 1..19: mol_type = other RNA
acccatcgatttcacagta

SEQ ID NO: 2602 - RNA, 19 nt, synthetic construct
  source 1..19: mol_type = other RNA
gacccatcgatttcacagt

SEQ ID NO: 2603 - RNA, 19 nt, synthetic construct
  source 1..19: mol_type = other RNA
agacccatcgatttcacag

SEQ ID NO: 2604 - RNA, 19 nt, synthetic construct
  source 1..19: mol_type = other RNA
cagacccatcgatttcaca

SEQ ID NO: 2605 - RNA, 19 nt, synthetic construct
  source 1..19: mol_type = other RNA
ccagacccatcgatttcac

SEQ ID NO: 2606 - RNA, 19 nt, synthetic construct
  source 1..19: mol_type = other RNA
tccagacccatcgatttca

SEQ ID NO: 2607 - RNA, 19 nt, synthetic construct
  source 1..19: mol_type = other RNA
ttccagacccatcgatttc

SEQ ID NO: 2608 - RNA, 19 nt, synthetic construct
  source 1..19: mol_type = other RNA
tttccagacccatcgattt

SEQ ID NO: 2609 - RNA, 19 nt, synthetic construct
  source 1..19: mol_type = other RNA
atttccagacccatcgatt

SEQ ID NO: 2610 - RNA, 19 nt, synthetic construct
  source 1..19: mol_type = other RNA
catttccagacccatcgat

SEQ ID NO: 2611 - RNA, 19 nt, synthetic construct
  source 1..19: mol_type = other RNA
ccatttccagacccatcga

SEQ ID NO: 2612 - RNA, 19 nt, synthetic construct
  source 1..19: mol_type = other RNA
tccatttccagacccatcg

SEQ ID NO: 2613 - RNA, 19 nt, synthetic construct
  source 1..19: mol_type = other RNA
atccatttccagacccatc

SEQ ID NO: 2614 - RNA, 19 nt, synthetic construct
  source 1..19: mol_type = other RNA
catccatttccagacccat

SEQ ID NO: 2615 - RNA, 19 nt, synthetic construct
  source 1..19: mol_type = other RNA
ccatccatttccagaccca

SEQ ID NO: 2616 - RNA, 19 nt, synthetic construct
  source 1..19: mol_type = other RNA
tccatccatttccagaccc

SEQ ID NO: 2617 - RNA, 19 nt, synthetic construct
  source 1..19: mol_type = other RNA
gtccatccatttccagacc

SEQ ID NO: 2618 - RNA, 19 nt, synthetic construct
  source 1..19: mol_type = other RNA
agtccatccatttccagac

SEQ ID NO: 2619 - RNA, 19 nt, synthetic construct
  source 1..19: mol_type = other RNA
cagtccatccatttccaga

SEQ ID NO: 2620 - RNA, 19 nt, synthetic construct
  source 1..19: mol_type = other RNA
acagtccatccatttccag

SEQ ID NO: 2621 - RNA, 19 nt, synthetic construct
  source 1..19: mol_type = other RNA
cacagtccatccatttcca

SEQ ID NO: 2622 - RNA, 19 nt, synthetic construct
  source 1..19: mol_type = other RNA
acacagtccatccatttcc

SEQ ID NO: 2623 - RNA, 19 nt, synthetic construct
  source 1..19: mol_type = other RNA
aacacagtccatccatttc

SEQ ID NO: 2624 - RNA, 19 nt, synthetic construct
  source 1..19: mol_type = other RNA
aaacacagtccatccattt

SEQ ID NO: 2625 - RNA, 19 nt, synthetic construct
  source 1..19: mol_type = other RNA
gaaacacagtccatccatt

SEQ ID NO: 2626 - RNA, 19 nt, synthetic construct
  source 1..19: mol_type = other RNA
tgaaacacagtccatccat

SEQ ID NO: 2627 - RNA, 19 nt, synthetic construct
  source 1..19: mol_type = other RNA
ctgaaacacagtccatcca

SEQ ID NO: 2628 - RNA, 19 nt, synthetic construct
  source 1..19: mol_type = other RNA
tctgaaacacagtccatcc

SEQ ID NO: 2629 - RNA, 19 nt, synthetic construct
  source 1..19: mol_type = other RNA
ttctgaaacacagtccatc

SEQ ID NO: 2630 - RNA, 19 nt, synthetic construct
  source 1..19: mol_type = other RNA
cttctgaaacacagtccat

SEQ ID NO: 2631 - RNA, 19 nt, synthetic construct
  source 1..19: mol_type = other RNA
tcttctgaaacacagtcca

SEQ ID NO: 2632 - RNA, 19 nt, synthetic construct
  source 1..19: mol_type = other RNA
ctcttctgaaacacagtcc

SEQ ID NO: 2633 - RNA, 19 nt, synthetic construct
  source 1..19: mol_type = other RNA
tctcttctgaaacacagtc

SEQ ID NO: 2634 - RNA, 19 nt, synthetic construct
  source 1..19: mol_type = other RNA
gtctcttctgaaacacagt

SEQ ID NO: 2635 - RNA, 19 nt, synthetic construct
  source 1..19: mol_type = other RNA
agtctcttctgaaacacag

SEQ ID NO: 2636 - RNA, 19 nt, synthetic construct
  source 1..19: mol_type = other RNA
aagtctcttctgaaacaca

SEQ ID NO: 2637 - RNA, 19 nt, synthetic construct
  source 1..19: mol_type = other RNA
caagtctcttctgaaacac

SEQ ID NO: 2638 - RNA, 19 nt, synthetic construct
  source 1..19: mol_type = other RNA
tcaagtctcttctgaaaca

SEQ ID NO: 2639 - RNA, 19 nt, synthetic construct
  source 1..19: mol_type = other RNA
atcaagtctcttctgaaac

SEQ ID NO: 2640 - RNA, 19 nt, synthetic construct
  source 1..19: mol_type = other RNA
catcaagtctcttctgaaa

SEQ ID NO: 2641 - RNA, 19 nt, synthetic construct
  source 1..19: mol_type = other RNA
ccatcaagtctcttctgaa

SEQ ID NO: 2642 - RNA, 19 nt, synthetic construct
  source 1..19: mol_type = other RNA
gccatcaagtctcttctga

SEQ ID NO: 2643 - RNA, 19 nt, synthetic construct
  source 1..19: mol_type = other RNA
tgccatcaagtctcttctg

SEQ ID NO: 2644 - RNA, 19 nt, synthetic construct
  source 1..19: mol_type = other RNA
ctgccatcaagtctcttct

SEQ ID NO: 2645 - RNA, 19 nt, synthetic construct
  source 1..19: mol_type = other RNA
actgccatcaagtctcttc

SEQ ID NO: 2646 - RNA, 19 nt, synthetic construct
  source 1..19: mol_type = other RNA
cactgccatcaagtctctt

SEQ ID NO: 2647 - RNA, 19 nt, synthetic construct
  source 1..19: mol_type = other RNA
acactgccatcaagtctct

SEQ ID NO: 2648 - RNA, 19 nt, synthetic construct
  source 1..19: mol_type = other RNA
tacactgccatcaagtctc

SEQ ID NO: 2649 - RNA, 19 nt, synthetic construct
  source 1..19: mol_type = other RNA
ctacactgccatcaagtct

SEQ ID NO: 2650 - RNA, 19 nt, synthetic construct
  source 1..19: mol_type = other RNA
tctacactgccatcaagtc

SEQ ID NO: 2651 - RNA, 19 nt, synthetic construct
  source 1..19: mol_type = other RNA
atctacactgccatcaagt

SEQ ID NO: 2652 - RNA, 19 nt, synthetic construct
  source 1..19: mol_type = other RNA
aatctacactgccatcaag

SEQ ID NO: 2653 - RNA, 19 nt, synthetic construct
  source 1..19: mol_type = other RNA
aaatctacactgccatcaa

SEQ ID NO: 2654 - RNA, 19 nt, synthetic construct
  source 1..19: mol_type = other RNA
gaaatctacactgccatca

SEQ ID NO: 2655 - RNA, 19 nt, synthetic construct
  source 1..19: mol_type = other RNA
tgaaatctacactgccatc

SEQ ID NO: 2656 - RNA, 19 nt, synthetic construct
  source 1..19: mol_type = other RNA
ttgaaatctacactgccat

SEQ ID NO: 2657 - RNA, 19 nt, synthetic construct
  source 1..19: mol_type = other RNA
cttgaaatctacactgcca

SEQ ID NO: 2658 - RNA, 19 nt, synthetic construct
  source 1..19: mol_type = other RNA
tcttgaaatctacactgcc

SEQ ID NO: 2659 - RNA, 19 nt, synthetic construct
  source 1..19: mol_type = other RNA
ttcttgaaatctacactgc

SEQ ID NO: 2660 - RNA, 19 nt, synthetic construct
  source 1..19: mol_type = other RNA
tttcttgaaatctacactg

SEQ ID NO: 2661 - RNA, 19 nt, synthetic construct
  source 1..19: mol_type = other RNA
ttttcttgaaatctacact

SEQ ID NO: 2662 - RNA, 19 nt, synthetic construct
  source 1..19: mol_type = other RNA
tttttcttgaaatctacac

SEQ ID NO: 2663 - RNA, 19 nt, synthetic construct
  source 1..19: mol_type = other RNA
gtttttcttgaaatctaca

SEQ ID NO: 2664 - RNA, 19 nt, synthetic construct
  source 1..19: mol_type = other RNA
agtttttcttgaaatctac

SEQ ID NO: 2665 - RNA, 19 nt, synthetic construct
  source 1..19: mol_type = other RNA
cagtttttcttgaaatcta

SEQ ID NO: 2666 - RNA, 19 nt, synthetic construct
  source 1..19: mol_type = other RNA
ccagtttttcttgaaatct

SEQ ID NO: 2667 - RNA, 19 nt, synthetic construct
  source 1..19: mol_type = other RNA
tccagtttttcttgaaatc

SEQ ID NO: 2668 - RNA, 19 nt, synthetic construct
  source 1..19: mol_type = other RNA
atccagtttttcttgaaat

SEQ ID NO: 2669 - RNA, 19 nt, synthetic construct
  source 1..19: mol_type = other RNA
aatccagtttttcttgaaa

SEQ ID NO: 2670 - RNA, 19 nt, synthetic construct
  source 1..19: mol_type = other RNA
gaatccagtttttcttgaa

SEQ ID NO: 2671 - RNA, 19 nt, synthetic construct
  source 1..19: mol_type = other RNA
tgaatccagtttttcttga

SEQ ID NO: 2672 - RNA, 19 nt, synthetic construct
  source 1..19: mol_type = other RNA
ttgaatccagtttttcttg

SEQ ID NO: 2673 - RNA, 19 nt, synthetic construct
  source 1..19: mol_type = other RNA
attgaatccagtttttctt

SEQ ID NO: 2674 - RNA, 19 nt, synthetic construct
  source 1..19: mol_type = other RNA
tattgaatccagtttttct

SEQ ID NO: 2675 - RNA, 19 nt, synthetic construct
  source 1..19: mol_type = other RNA
atattgaatccagtttttc

SEQ ID NO: 2676 - RNA, 19 nt, synthetic construct
  source 1..19: mol_type = other RNA
tatattgaatccagttttt

SEQ ID NO: 2677 - RNA, 19 nt, synthetic construct
  source 1..19: mol_type = other RNA
ttatattgaatccagtttt

SEQ ID NO: 2678 - RNA, 19 nt, synthetic construct
  source 1..19: mol_type = other RNA
tttatattgaatccagttt

SEQ ID NO: 2679 - RNA, 19 nt, synthetic construct
  source 1..19: mol_type = other RNA
ctttatattgaatccagtt

SEQ ID NO: 2680 - RNA, 19 nt, synthetic construct
  source 1..19: mol_type = other RNA
tctttatattgaatccagt

SEQ ID NO: 2681 - RNA, 19 nt, synthetic construct
  source 1..19: mol_type = other RNA
ttctttatattgaatccag

SEQ ID NO: 2682 - RNA, 19 nt, synthetic construct
  source 1..19: mol_type = other RNA
cttctttatattgaatcca

SEQ ID NO: 2683 - RNA, 19 nt, synthetic construct
  source 1..19: mol_type = other RNA
ccttctttatattgaatcc

SEQ ID NO: 2684 - RNA, 19 nt, synthetic construct
  source 1..19: mol_type = other RNA
tccttctttatattgaatc

SEQ ID NO: 2685 - RNA, 19 nt, synthetic construct
  source 1..19: mol_type = other RNA
atccttctttatattgaat

SEQ ID NO: 2686 - RNA, 19 nt, synthetic construct
  source 1..19: mol_type = other RNA
aatccttctttatattgaa

SEQ ID NO: 2687 - RNA, 19 nt, synthetic construct
  source 1..19: mol_type = other RNA
aaatccttctttatattga

SEQ ID NO: 2688 - RNA, 19 nt, synthetic construct
  source 1..19: mol_type = other RNA
caaatccttctttatattg

SEQ ID NO: 2689 - RNA, 19 nt, synthetic construct
  source 1..19: mol_type = other RNA
ccaaatccttctttatatt

SEQ ID NO: 2690 - RNA, 19 nt, synthetic construct
  source 1..19: mol_type = other RNA
tccaaatccttctttatat

SEQ ID NO: 2691 - RNA, 19 nt, synthetic construct
  source 1..19: mol_type = other RNA
gtccaaatccttctttata

SEQ ID NO: 2692 - RNA, 19 nt, synthetic construct
  source 1..19: mol_type = other RNA
tgtccaaatccttctttat

SEQ ID NO: 2693 - RNA, 19 nt, synthetic construct
  source 1..19: mol_type = other RNA
atgtccaaatccttcttta

SEQ ID NO: 2694 - RNA, 19 nt, synthetic construct
  source 1..19: mol_type = other RNA
gatgtccaaatccttcttt

SEQ ID NO: 2695 - RNA, 19 nt, synthetic construct
  source 1..19: mol_type = other RNA
agatgtccaaatccttctt

SEQ ID NO: 2696 - RNA, 19 nt, synthetic construct
  source 1..19: mol_type = other RNA
cagatgtccaaatccttct

SEQ ID NO: 2697 - RNA, 19 nt, synthetic construct
  source 1..19: mol_type = other RNA
acagatgtccaaatccttc

SEQ ID NO: 2698 - RNA, 19 nt, synthetic construct
  source 1..19: mol_type = other RNA
gacagatgtccaaatcctt

SEQ ID NO: 2699 - RNA, 19 nt, synthetic construct
  source 1..19: mol_type = other RNA
agacagatgtccaaatcct

SEQ ID NO: 2700 - RNA, 19 nt, synthetic construct
  source 1..19: mol_type = other RNA
gagacagatgtccaaatcc

SEQ ID NO: 2701 - RNA, 19 nt, synthetic construct
  source 1..19: mol_type = other RNA
ggagacagatgtccaaatc

SEQ ID NO: 2702 - RNA, 19 nt, synthetic construct
  source 1..19: mol_type = other RNA
aggagacagatgtccaaat

SEQ ID NO: 2703 - RNA, 19 nt, synthetic construct
  source 1..19: mol_type = other RNA
taggagacagatgtccaaa

SEQ ID NO: 2704 - RNA, 19 nt, synthetic construct
  source 1..19: mol_type = other RNA
gtaggagacagatgtccaa

SEQ ID NO: 2705 - RNA, 19 nt, synthetic construct
  source 1..19: mol_type = other RNA
agtaggagacagatgtcca

SEQ ID NO: 2706 - RNA, 19 nt, synthetic construct
  source 1..19: mol_type = other RNA
cagtaggagacagatgtcc

SEQ ID NO: 2707 - RNA, 19 nt, synthetic construct
  source 1..19: mol_type = other RNA
ccagtaggagacagatgtc

SEQ ID NO: 2708 - RNA, 19 nt, synthetic construct
  source 1..19: mol_type = other RNA
gccagtaggagacagatgt

SEQ ID NO: 2709 - RNA, 19 nt, synthetic construct
  source 1..19: mol_type = other RNA
tgccagtaggagacagatg

SEQ ID NO: 2710 - RNA, 19 nt, synthetic construct
  source 1..19: mol_type = other RNA
gtgccagtaggagacagat

SEQ ID NO: 2711 - RNA, 19 nt, synthetic construct
  source 1..19: mol_type = other RNA
tgtgccagtaggagacaga

SEQ ID NO: 2712 - RNA, 19 nt, synthetic construct
  source 1..19: mol_type = other RNA
ttgtgccagtaggagacag

SEQ ID NO: 2713 - RNA, 19 nt, synthetic construct
  source 1..19: mol_type = other RNA
gttgtgccagtaggagaca

SEQ ID NO: 2714 - RNA, 19 nt, synthetic construct
  source 1..19: mol_type = other RNA
tgttgtgccagtaggagac

SEQ ID NO: 2715 - RNA, 19 nt, synthetic construct
  source 1..19: mol_type = other RNA
ctgttgtgccagtaggaga

SEQ ID NO: 2716 - RNA, 19 nt, synthetic construct
  source 1..19: mol_type = other RNA
tctgttgtgccagtaggag

SEQ ID NO: 2717 - RNA, 19 nt, synthetic construct
  source 1..19: mol_type = other RNA
ttctgttgtgccagtagga

SEQ ID NO: 2718 - RNA, 19 nt, synthetic construct
  source 1..19: mol_type = other RNA
attctgttgtgccagtagg

SEQ ID NO: 2719 - RNA, 19 nt, synthetic construct
  source 1..19: mol_type = other RNA
aattctgttgtgccagtag

SEQ ID NO: 2720 - RNA, 19 nt, synthetic construct
  source 1..19: mol_type = other RNA
aaattctgttgtgccagta

SEQ ID NO: 2721 - RNA, 19 nt, synthetic construct
  source 1..19: mol_type = other RNA
aaaattctgttgtgccagt

SEQ ID NO: 2722 - RNA, 19 nt, synthetic construct
  source 1..19: mol_type = other RNA
caaaattctgttgtgccag

SEQ ID NO: 2723 - RNA, 19 nt, synthetic construct
  source 1..19: mol_type = other RNA
ccaaaattctgttgtgcca

SEQ ID NO: 2724 - RNA, 19 nt, synthetic construct
  source 1..19: mol_type = other RNA
gccaaaattctgttgtgcc

SEQ ID NO: 2725 - RNA, 19 nt, synthetic construct
  source 1..19: mol_type = other RNA
agccaaaattctgttgtgc

SEQ ID NO: 2726 - RNA, 19 nt, synthetic construct
  source 1..19: mol_type = other RNA
cagccaaaattctgttgtg

SEQ ID NO: 2727 - RNA, 19 nt, synthetic construct
  source 1..19: mol_type = other RNA
ccagccaaaattctgttgt

SEQ ID NO: 2728 - RNA, 19 nt, synthetic construct
  source 1..19: mol_type = other RNA
cccagccaaaattctgttg

SEQ ID NO: 2729 - RNA, 19 nt, synthetic construct
  source 1..19: mol_type = other RNA
tcccagccaaaattctgtt

SEQ ID NO: 2730 - RNA, 19 nt, synthetic construct
  source 1..19: mol_type = other RNA
ttcccagccaaaattctgt

SEQ ID NO: 2731 - RNA, 19 nt, synthetic construct
  source 1..19: mol_type = other RNA
tttcccagccaaaattctg

SEQ ID NO: 2732 - RNA, 19 nt, synthetic construct
  source 1..19: mol_type = other RNA
atttcccagccaaaattct

SEQ ID NO: 2733 - RNA, 19 nt, synthetic construct
  source 1..19: mol_type = other RNA
catttcccagccaaaattc

SEQ ID NO: 2734 - RNA, 19 nt, synthetic construct
  source 1..19: mol_type = other RNA
tcatttcccagccaaaatt

SEQ ID NO: 2735 - RNA, 19 nt, synthetic construct
  source 1..19: mol_type = other RNA
ctcatttcccagccaaaat

SEQ ID NO: 2736 - RNA, 19 nt, synthetic construct
  source 1..19: mol_type = other RNA
tctcatttcccagccaaaa

SEQ ID NO: 2737 - RNA, 19 nt, synthetic construct
  source 1..19: mol_type = other RNA
ttctcatttcccagccaaa

SEQ ID NO: 2738 - RNA, 19 nt, synthetic construct
  source 1..19: mol_type = other RNA
cttctcatttcccagccaa

SEQ ID NO: 2739 - RNA, 19 nt, synthetic construct
  source 1..19: mol_type = other RNA
tcttctcatttcccagcca

SEQ ID NO: 2740 - RNA, 19 nt, synthetic construct
  source 1..19: mol_type = other RNA
atcttctcatttcccagcc

SEQ ID NO: 2741 - RNA, 19 nt, synthetic construct
  source 1..19: mol_type = other RNA
aatcttctcatttcccagc

SEQ ID NO: 2742 - RNA, 19 nt, synthetic construct
  source 1..19: mol_type = other RNA
gaatcttctcatttcccag

SEQ ID NO: 2743 - RNA, 19 nt, synthetic construct
  source 1..19: mol_type = other RNA
tgaatcttctcatttccca

SEQ ID NO: 2744 - RNA, 19 nt, synthetic construct
  source 1..19: mol_type = other RNA
atgaatcttctcatttccc

SEQ ID NO: 2745 - RNA, 19 nt, synthetic construct
  source 1..19: mol_type = other RNA
aatgaatcttctcatttcc

SEQ ID NO: 2746 - RNA, 19 nt, synthetic construct
  source 1..19: mol_type = other RNA
aaatgaatcttctcatttc

SEQ ID NO: 2747 - RNA, 19 nt, synthetic construct
  source 1..19: mol_type = other RNA
caaatgaatcttctcattt

SEQ ID NO: 2748 - RNA, 19 nt, synthetic construct
  source 1..19: mol_type = other RNA
tcaaatgaatcttctcatt

SEQ ID NO: 2749 - RNA, 19 nt, synthetic construct
  source 1..19: mol_type = other RNA
atcaaatgaatcttctcat

SEQ ID NO: 2750 - RNA, 19 nt, synthetic construct
  source 1..19: mol_type = other RNA
tatcaaatgaatcttctca

SEQ ID NO: 2751 - RNA, 19 nt, synthetic construct
  source 1..19: mol_type = other RNA
ttatcaaatgaatcttctc

SEQ ID NO: 2752 - RNA, 19 nt, synthetic construct
  source 1..19: mol_type = other RNA
cttatcaaatgaatcttct

SEQ ID NO: 2753 - RNA, 19 nt, synthetic construct
  source 1..19: mol_type = other RNA
gcttatcaaatgaatcttc

SEQ ID NO: 2754 - RNA, 19 nt, synthetic construct
  source 1..19: mol_type = other RNA
tgcttatcaaatgaatctt

SEQ ID NO: 2755 - RNA, 19 nt, synthetic construct
  source 1..19: mol_type = other RNA
gtgcttatcaaatgaatct

SEQ ID NO: 2756 - RNA, 19 nt, synthetic construct
  source 1..19: mol_type = other RNA
tgtgcttatcaaatgaatc

SEQ ID NO: 2757 - RNA, 19 nt, synthetic construct
  source 1..19: mol_type = other RNA
gtgtgcttatcaaatgaat

SEQ ID NO: 2758 - RNA, 19 nt, synthetic construct
  source 1..19: mol_type = other RNA
tgtgtgcttatcaaatgaa

SEQ ID NO: 2759 - RNA, 19 nt, synthetic construct
  source 1..19: mol_type = other RNA
ctgtgtgcttatcaaatga

SEQ ID NO: 2760 - RNA, 19 nt, synthetic construct
  source 1..19: mol_type = other RNA
actgtgtgcttatcaaatg

SEQ ID NO: 2761 - RNA, 19 nt, synthetic construct
  source 1..19: mol_type = other RNA
gactgtgtgcttatcaaat

SEQ ID NO: 2762 - RNA, 19 nt, synthetic construct
  source 1..19: mol_type = other RNA
agactgtgtgcttatcaaa

SEQ ID NO: 2763 - RNA, 19 nt, synthetic construct
  source 1..19: mol_type = other RNA
cagactgtgtgcttatcaa

SEQ ID NO: 2764 - RNA, 19 nt, synthetic construct
  source 1..19: mol_type = other RNA
gcagactgtgtgcttatca

SEQ ID NO: 2765 - RNA, 19 nt, synthetic construct
  source 1..19: mol_type = other RNA
ggcagactgtgtgcttatc

SEQ ID NO: 2766 - RNA, 19 nt, synthetic construct
  source 1..19: mol_type = other RNA
tggcagactgtgtgcttat

SEQ ID NO: 2767 - RNA, 19 nt, synthetic construct
  source 1..19: mol_type = other RNA
atggcagactgtgtgctta

SEQ ID NO: 2768 - RNA, 19 nt, synthetic construct
  source 1..19: mol_type = other RNA
gatggcagactgtgtgctt

SEQ ID NO: 2769 - RNA, 19 nt, synthetic construct
  source 1..19: mol_type = other RNA
ggatggcagactgtgtgct

SEQ ID NO: 2770 - RNA, 19 nt, synthetic construct
  source 1..19: mol_type = other RNA
gggatggcagactgtgtgc

SEQ ID NO: 2771 - RNA, 19 nt, synthetic construct
  source 1..19: mol_type = other RNA
tgggatggcagactgtgtg

SEQ ID NO: 2772 - RNA, 19 nt, synthetic construct
  source 1..19: mol_type = other RNA
atgggatggcagactgtgt

SEQ ID NO: 2773 - RNA, 19 nt, synthetic construct
  source 1..19: mol_type = other RNA
tatgggatggcagactgtg

SEQ ID NO: 2774 - RNA, 19 nt, synthetic construct
  source 1..19: mol_type = other RNA
atatgggatggcagactgt

SEQ ID NO: 2775 - RNA, 19 nt, synthetic construct
  source 1..19: mol_type = other RNA
catatgggatggcagactg

SEQ ID NO: 2776 - RNA, 19 nt, synthetic construct
  source 1..19: mol_type = other RNA
gcatatgggatggcagact

SEQ ID NO: 2777 - RNA, 19 nt, synthetic construct
  source 1..19: mol_type = other RNA
tgcatatgggatggcagac

SEQ ID NO: 2778 - RNA, 19 nt, synthetic construct
  source 1..19: mol_type = other RNA
atgcatatgggatggcaga

SEQ ID NO: 2779 - RNA, 19 nt, synthetic construct
  source 1..19: mol_type = other RNA
aatgcatatgggatggcag

SEQ ID NO: 2780 - RNA, 19 nt, synthetic construct
  source 1..19: mol_type = other RNA
taatgcatatgggatggca

SEQ ID NO: 2781 - RNA, 19 nt, synthetic construct
  source 1..19: mol_type = other RNA
ttaatgcatatgggatggc

SEQ ID NO: 2782 - RNA, 19 nt, synthetic construct
  source 1..19: mol_type = other RNA
cttaatgcatatgggatgg

SEQ ID NO: 2783 - RNA, 19 nt, synthetic construct
  source 1..19: mol_type = other RNA
tcttaatgcatatgggatg

SEQ ID NO: 2784 - RNA, 19 nt, synthetic construct
  source 1..19: mol_type = other RNA
ctcttaatgcatatgggat

SEQ ID NO: 2785 - RNA, 19 nt, synthetic construct
  source 1..19: mol_type = other RNA
actcttaatgcatatggga

SEQ ID NO: 2786 - RNA, 19 nt, synthetic construct
  source 1..19: mol_type = other RNA
cactcttaatgcatatggg

SEQ ID NO: 2787 - RNA, 19 nt, synthetic construct
  source 1..19: mol_type = other RNA
ccactcttaatgcatatgg

SEQ ID NO: 2788 - RNA, 19 nt, synthetic construct
  source 1..19: mol_type = other RNA
tccactcttaatgcatatg

SEQ ID NO: 2789 - RNA, 19 nt, synthetic construct
  source 1..19: mol_type = other RNA
ttccactcttaatgcatat

SEQ ID NO: 2790 - RNA, 19 nt, synthetic construct
  source 1..19: mol_type = other RNA
gttccactcttaatgcata

SEQ ID NO: 2791 - RNA, 19 nt, synthetic construct
  source 1..19: mol_type = other RNA
agttccactcttaatgcat

SEQ ID NO: 2792 - RNA, 19 nt, synthetic construct
  source 1..19: mol_type = other RNA
cagttccactcttaatgca

SEQ ID NO: 2793 - RNA, 19 nt, synthetic construct
  source 1..19: mol_type = other RNA
ccagttccactcttaatgc

SEQ ID NO: 2794 - RNA, 19 nt, synthetic construct
  source 1..19: mol_type = other RNA
tccagttccactcttaatg

SEQ ID NO: 2795 - RNA, 19 nt, synthetic construct
  source 1..19: mol_type = other RNA
ttccagttccactcttaat

SEQ ID NO: 2796 - RNA, 19 nt, synthetic construct
  source 1..19: mol_type = other RNA
cttccagttccactcttaa

SEQ ID NO: 2797 - RNA, 19 nt, synthetic construct
  source 1..19: mol_type = other RNA
tcttccagttccactctta

SEQ ID NO: 2798 - RNA, 19 nt, synthetic construct
  source 1..19: mol_type = other RNA
gtcttccagttccactctt

SEQ ID NO: 2799 - RNA, 19 nt, synthetic construct
  source 1..19: mol_type = other RNA
agtcttccagttccactct

SEQ ID NO: 2800 - RNA, 19 nt, synthetic construct
  source 1..19: mol_type = other RNA
cagtcttccagttccactc

SEQ ID NO: 2801 - RNA, 19 nt, synthetic construct
  source 1..19: mol_type = other RNA
ccagtcttccagttccact

SEQ ID NO: 2802 - RNA, 19 nt, synthetic construct
  source 1..19: mol_type = other RNA
tccagtcttccagttccac

SEQ ID NO: 2803 - RNA, 19 nt, synthetic construct
  source 1..19: mol_type = other RNA
ttccagtcttccagttcca

SEQ ID NO: 2804 - RNA, 19 nt, synthetic construct
  source 1..19: mol_type = other RNA
attccagtcttccagttcc

SEQ ID NO: 2805 - RNA, 19 nt, synthetic construct
  source 1..19: mol_type = other RNA
cattccagtcttccagttc

SEQ ID NO: 2806 - RNA, 19 nt, synthetic construct
  source 1..19: mol_type = other RNA
ccattccagtcttccagtt

SEQ ID NO: 2807 - RNA, 19 nt, synthetic construct
  source 1..19: mol_type = other RNA
gccattccagtcttccagt

SEQ ID NO: 2808 - RNA, 19 nt, synthetic construct
  source 1..19: mol_type = other RNA
tgccattccagtcttccag

SEQ ID NO: 2809 - RNA, 19 nt, synthetic construct
  source 1..19: mol_type = other RNA
ctgccattccagtcttcca

SEQ ID NO: 2810 - RNA, 19 nt, synthetic construct
  source 1..19: mol_type = other RNA
tctgccattccagtcttcc

SEQ ID NO: 2811 - RNA, 19 nt, synthetic construct
  source 1..19: mol_type = other RNA
ttctgccattccagtcttc

SEQ ID NO: 2812 - RNA, 19 nt, synthetic construct
  source 1..19: mol_type = other RNA
gttctgccattccagtctt

SEQ ID NO: 2813 - RNA, 19 nt, synthetic construct
  source 1..19: mol_type = other RNA
ggttctgccattccagtct

SEQ ID NO: 2814 - RNA, 19 nt, synthetic construct
  source 1..19: mol_type = other RNA
tggttctgccattccagtc

SEQ ID NO: 2815 - RNA, 19 nt, synthetic construct
  source 1..19: mol_type = other RNA
ctggttctgccattccagt

SEQ ID NO: 2816 - RNA, 19 nt, synthetic construct
  source 1..19: mol_type = other RNA
actggttctgccattccag

SEQ ID NO: 2817 - RNA, 19 nt, synthetic construct
  source 1..19: mol_type = other RNA
tactggttctgccattcca

SEQ ID NO: 2818 - RNA, 19 nt, synthetic construct
  source 1..19: mol_type = other RNA
gtactggttctgccattcc

SEQ ID NO: 2819 - RNA, 19 nt, synthetic construct
  source 1..19: mol_type = other RNA
agtactggttctgccattc

SEQ ID NO: 2820 - RNA, 19 nt, synthetic construct
  source 1..19: mol_type = other RNA
cagtactggttctgccatt

SEQ ID NO: 2821 - RNA, 19 nt, synthetic construct
  source 1..19: mol_type = other RNA
gcagtactggttctgccat

SEQ ID NO: 2822 - RNA, 19 nt, synthetic construct
  source 1..19: mol_type = other RNA
tgcagtactggttctgcca

SEQ ID NO: 2823 - RNA, 19 nt, synthetic construct
  source 1..19: mol_type = other RNA
ctgcagtactggttctgcc

SEQ ID NO: 2824 - RNA, 19 nt, synthetic construct
  source 1..19: mol_type = other RNA
tctgcagtactggttctgc

SEQ ID NO: 2825 - RNA, 19 nt, synthetic construct
  source 1..19: mol_type = other RNA
gtctgcagtactggttctg

SEQ ID NO: 2826 - RNA, 19 nt, synthetic construct
  source 1..19: mol_type = other RNA
agtctgcagtactggttct

SEQ ID NO: 2827 - RNA, 19 nt, synthetic construct
  source 1..19: mol_type = other RNA
tagtctgcagtactggttc

SEQ ID NO: 2828 - RNA, 19 nt, synthetic construct
  source 1..19: mol_type = other RNA
atagtctgcagtactggtt

SEQ ID NO: 2829 - RNA, 19 nt, synthetic construct
  source 1..19: mol_type = other RNA
catagtctgcagtactggt

SEQ ID NO: 2830 - RNA, 19 nt, synthetic construct
  source 1..19: mol_type = other RNA
gcatagtctgcagtactgg

SEQ ID NO: 2831 - RNA, 19 nt, synthetic construct
  source 1..19: mol_type = other RNA
ggcatagtctgcagtactg

SEQ ID NO: 2832 - RNA, 19 nt, synthetic construct
  source 1..19: mol_type = other RNA
tggcatagtctgcagtact

SEQ ID NO: 2833 - RNA, 19 nt, synthetic construct
  source 1..19: mol_type = other RNA
atggcatagtctgcagtac

SEQ ID NO: 2834 - RNA, 19 nt, synthetic construct
  source 1..19: mol_type = other RNA
catggcatagtctgcagta

SEQ ID NO: 2835 - RNA, 19 nt, synthetic construct
  source 1..19: mol_type = other RNA
acatggcatagtctgcagt

SEQ ID NO: 2836 - RNA, 19 nt, synthetic construct
  source 1..19: mol_type = other RNA
aacatggcatagtctgcag

SEQ ID NO: 2837 - RNA, 19 nt, synthetic construct
  source 1..19: mol_type = other RNA
gaacatggcatagtctgca

SEQ ID NO: 2838 - RNA, 19 nt, synthetic construct
  source 1..19: mol_type = other RNA
tgaacatggcatagtctgc

SEQ ID NO: 2839 - RNA, 19 nt, synthetic construct
  source 1..19: mol_type = other RNA
ttgaacatggcatagtctg

SEQ ID NO: 2840 - RNA, 19 nt, synthetic construct
  source 1..19: mol_type = other RNA
cttgaacatggcatagtct

SEQ ID NO: 2841 - RNA, 19 nt, synthetic construct
  source 1..19: mol_type = other RNA
ccttgaacatggcatagtc

SEQ ID NO: 2842 - RNA, 19 nt, synthetic construct
  source 1..19: mol_type = other RNA
accttgaacatggcatagt

SEQ ID NO: 2843 - RNA, 19 nt, synthetic construct
  source 1..19: mol_type = other RNA
caccttgaacatggcatag

SEQ ID NO: 2844 - RNA, 19 nt, synthetic construct
  source 1..19: mol_type = other RNA
ccaccttgaacatggcata

SEQ ID NO: 2845 - RNA, 19 nt, synthetic construct
  source 1..19: mol_type = other RNA
cccaccttgaacatggcat

SEQ ID NO: 2846 - RNA, 19 nt, synthetic construct
  source 1..19: mol_type = other RNA
tcccaccttgaacatggca

SEQ ID NO: 2847 - RNA, 19 nt, synthetic construct
  source 1..19: mol_type = other RNA
gtcccaccttgaacatggc

SEQ ID NO: 2848 - RNA, 19 nt, synthetic construct
  source 1..19: mol_type = other RNA
ggtcccaccttgaacatgg

SEQ ID NO: 2849 - RNA, 19 nt, synthetic construct
  source 1..19: mol_type = other RNA
aggtcccaccttgaacatg

SEQ ID NO: 2850 - RNA, 19 nt, synthetic construct
  source 1..19: mol_type = other RNA
caggtcccaccttgaacat

SEQ ID NO: 2851 - RNA, 19 nt, synthetic construct
  source 1..19: mol_type = other RNA
tcaggtcccaccttgaaca

SEQ ID NO: 2852 - RNA, 19 nt, synthetic construct
  source 1..19: mol_type = other RNA
ttcaggtcccaccttgaac

SEQ ID NO: 2853 - RNA, 19 nt, synthetic construct
  source 1..19: mol_type = other RNA
cttcaggtcccaccttgaa

SEQ ID NO: 2854 - RNA, 19 nt, synthetic construct
  source 1..19: mol_type = other RNA
gcttcaggtcccaccttga

SEQ ID NO: 2855 - RNA, 19 nt, synthetic construct
  source 1..19: mol_type = other RNA
agcttcaggtcccaccttg

SEQ ID NO: 2856 - RNA, 19 nt, synthetic construct
  source 1..19: mol_type = other RNA
cagcttcaggtcccacctt

SEQ ID NO: 2857 - RNA, 19 nt, synthetic construct
  source 1..19: mol_type = other RNA
tcagcttcaggtcccacct

SEQ ID NO: 2858 - RNA, 19 nt, synthetic construct
  source 1..19: mol_type = other RNA
gtcagcttcaggtcccacc

SEQ ID NO: 2859 - RNA, 19 nt, synthetic construct
  source 1..19: mol_type = other RNA
tgtcagcttcaggtcccac

SEQ ID NO: 2860 - RNA, 19 nt, synthetic construct
  source 1..19: mol_type = other RNA
ttgtcagcttcaggtccca

SEQ ID NO: 2861 - RNA, 19 nt, synthetic construct
  source 1..19: mol_type = other RNA
cttgtcagcttcaggtccc

SEQ ID NO: 2862 - RNA, 19 nt, synthetic construct
  source 1..19: mol_type = other RNA
acttgtcagcttcaggtcc

SEQ ID NO: 2863 - RNA, 19 nt, synthetic construct
  source 1..19: mol_type = other RNA
tacttgtcagcttcaggtc

SEQ ID NO: 2864 - RNA, 19 nt, synthetic construct
  source 1..19: mol_type = other RNA
gtacttgtcagcttcaggt

SEQ ID NO: 2865 - RNA, 19 nt, synthetic construct
  source 1..19: mol_type = other RNA
ggtacttgtcagcttcagg

SEQ ID NO: 2866 - RNA, 19 nt, synthetic construct
  source 1..19: mol_type = other RNA
cggtacttgtcagcttcag

SEQ ID NO: 2867 - RNA, 19 nt, synthetic construct
  source 1..19: mol_type = other RNA
gcggtacttgtcagcttca

SEQ ID NO: 2868 - RNA, 19 nt, synthetic construct
  source 1..19: mol_type = other RNA
ggcggtacttgtcagcttc

SEQ ID NO: 2869 - RNA, 19 nt, synthetic construct
  source 1..19: mol_type = other RNA
aggcggtacttgtcagctt

SEQ ID NO: 2870 - RNA, 19 nt, synthetic construct
  source 1..19: mol_type = other RNA
taggcggtacttgtcagct

SEQ ID NO: 2871 - RNA, 19 nt, synthetic construct
  source 1..19: mol_type = other RNA
ttaggcggtacttgtcagc

SEQ ID NO: 2872 - RNA, 19 nt, synthetic construct
  source 1..19: mol_type = other RNA
gttaggcggtacttgtcag

SEQ ID NO: 2873 - RNA, 19 nt, synthetic construct
  source 1..19: mol_type = other RNA
tgttaggcggtacttgtca

SEQ ID NO: 2874 - RNA, 19 nt, synthetic construct
  source 1..19: mol_type = other RNA
atgttaggcggtacttgtc

SEQ ID NO: 2875 - RNA, 19 nt, synthetic construct
  source 1..19: mol_type = other RNA
tatgttaggcggtacttgt

SEQ ID NO: 2876 - RNA, 19 nt, synthetic construct
  source 1..19: mol_type = other RNA
atatgttaggcggtacttg

SEQ ID NO: 2877 - RNA, 19 nt, synthetic construct
  source 1..19: mol_type = other RNA
catatgttaggcggtactt

SEQ ID NO: 2878 - RNA, 19 nt, synthetic construct
  source 1..19: mol_type = other RNA
gcatatgttaggcggtact

SEQ ID NO: 2879 - RNA, 19 nt, synthetic construct
  source 1..19: mol_type = other RNA
ggcatatgttaggcggtac

SEQ ID NO: 2880 - RNA, 19 nt, synthetic construct
  source 1..19: mol_type = other RNA
aggcatatgttaggcggta

SEQ ID NO: 2881 - RNA, 19 nt, synthetic construct
  source 1..19: mol_type = other RNA
taggcatatgttaggcggt

SEQ ID NO: 2882 - RNA, 19 nt, synthetic construct
  source 1..19: mol_type = other RNA
gtaggcatatgttaggcgg

SEQ ID NO: 2883 - RNA, 19 nt, synthetic construct
  source 1..19: mol_type = other RNA
agtaggcatatgttaggcg

SEQ ID NO: 2884 - RNA, 19 nt, synthetic construct
  source 1..19: mol_type = other RNA
aagtaggcatatgttaggc

SEQ ID NO: 2885 - RNA, 19 nt, synthetic construct
  source 1..19: mol_type = other RNA
gaagtaggcatatgttagg

SEQ ID NO: 2886 - RNA, 19 nt, synthetic construct
  source 1..19: mol_type = other RNA
cgaagtaggcatatgttag

SEQ ID NO: 2887 - RNA, 19 nt, synthetic construct
  source 1..19: mol_type = other RNA
gcgaagtaggcatatgtta

SEQ ID NO: 2888 - RNA, 19 nt, synthetic construct
  source 1..19: mol_type = other RNA
agcgaagtaggcatatgtt

SEQ ID NO: 2889 - RNA, 19 nt, synthetic construct
  source 1..19: mol_type = other RNA
cagcgaagtaggcatatgt

SEQ ID NO: 2890 - RNA, 19 nt, synthetic construct
  source 1..19: mol_type = other RNA
ccagcgaagtaggcatatg

SEQ ID NO: 2891 - RNA, 19 nt, synthetic construct
  source 1..19: mol_type = other RNA
accagcgaagtaggcatat

SEQ ID NO: 2892 - RNA, 19 nt, synthetic construct
  source 1..19: mol_type = other RNA
caccagcgaagtaggcata

SEQ ID NO: 2893 - RNA, 19 nt, synthetic construct
  source 1..19: mol_type = other RNA
ccaccagcgaagtaggcat

SEQ ID NO: 2894 - RNA, 19 nt, synthetic construct
  source 1..19: mol_type = other RNA
cccaccagcgaagtaggca

SEQ ID NO: 2895 - RNA, 19 nt, synthetic construct
  source 1..19: mol_type = other RNA
ccccaccagcgaagtaggc

SEQ ID NO: 2896 - RNA, 19 nt, synthetic construct
  source 1..19: mol_type = other RNA
tccccaccagcgaagtagg

SEQ ID NO: 2897 - RNA, 19 nt, synthetic construct
  source 1..19: mol_type = other RNA
atccccaccagcgaagtag

SEQ ID NO: 2898 - RNA, 19 nt, synthetic construct
  source 1..19: mol_type = other RNA
catccccaccagcgaagta

SEQ ID NO: 2899 - RNA, 19 nt, synthetic construct
  source 1..19: mol_type = other RNA
gcatccccaccagcgaagt

SEQ ID NO: 2900 - RNA, 19 nt, synthetic construct
  source 1..19: mol_type = other RNA
agcatccccaccagcgaag

SEQ ID NO: 2901 - RNA, 19 nt, synthetic construct
  source 1..19: mol_type = other RNA
cagcatccccaccagcgaa

SEQ ID NO: 2902 - RNA, 19 nt, synthetic construct
  source 1..19: mol_type = other RNA
ccagcatccccaccagcga

SEQ ID NO: 2903 - RNA, 19 nt, synthetic construct
  source 1..19: mol_type = other RNA
tccagcatccccaccagcg

SEQ ID NO: 2904 - RNA, 19 nt, synthetic construct
  source 1..19: mol_type = other RNA
ctccagcatccccaccagc

SEQ ID NO: 2905 - RNA, 19 nt, synthetic construct
  source 1..19: mol_type = other RNA
tctccagcatccccaccag

SEQ ID NO: 2906 - RNA, 19 nt, synthetic construct
  source 1..19: mol_type = other RNA
atctccagcatccccacca

SEQ ID NO: 2907 - RNA, 19 nt, synthetic construct
  source 1..19: mol_type = other RNA
catctccagcatccccacc

SEQ ID NO: 2908 - RNA, 19 nt, synthetic construct
  source 1..19: mol_type = other RNA
gcatctccagcatccccac

SEQ ID NO: 2909 - RNA, 19 nt, synthetic construct
  source 1..19: mol_type = other RNA
ggcatctccagcatcccca

SEQ ID NO: 2910 - RNA, 19 nt, synthetic construct
  source 1..19: mol_type = other RNA
aggcatctccagcatcccc

SEQ ID NO: 2911 - RNA, 19 nt, synthetic construct
  source 1..19: mol_type = other RNA
aaggcatctccagcatccc

SEQ ID NO: 2912 - RNA, 19 nt, synthetic construct
  source 1..19: mol_type = other RNA
aaaggcatctccagcatcc

SEQ ID NO: 2913 - RNA, 19 nt, synthetic construct
  source 1..19: mol_type = other RNA
caaaggcatctccagcatc

SEQ ID NO: 2914 - RNA, 19 nt, synthetic construct
  source 1..19: mol_type = other RNA
tcaaaggcatctccagcat

SEQ ID NO: 2915 - RNA, 19 nt, synthetic construct
  source 1..19: mol_type = other RNA
atcaaaggcatctccagca

SEQ ID NO: 2916 - RNA, 19 nt, synthetic construct
  source 1..19: mol_type = other RNA
catcaaaggcatctccagc

SEQ ID NO: 2917 - RNA, 19 nt, synthetic construct
  source 1..19: mol_type = other RNA
ccatcaaaggcatctccag

SEQ ID NO: 2918 - RNA, 19 nt, synthetic construct
  source 1..19: mol_type = other RNA
gccatcaaaggcatctcca

SEQ ID NO: 2919 - RNA, 19 nt, synthetic construct
  source 1..19: mol_type = other RNA
agccatcaaaggcatctcc

SEQ ID NO: 2920 - RNA, 19 nt, synthetic construct
  source 1..19: mol_type = other RNA
aagccatcaaaggcatctc

SEQ ID NO: 2921 - RNA, 19 nt, synthetic construct
  source 1..19: mol_type = other RNA
aaagccatcaaaggcatct

SEQ ID NO: 2922 - RNA, 19 nt, synthetic construct
  source 1..19: mol_type = other RNA
caaagccatcaaaggcatc

SEQ ID NO: 2923 - RNA, 19 nt, synthetic construct
  source 1..19: mol_type = other RNA
tcaaagccatcaaaggcat

SEQ ID NO: 2924 - RNA, 19 nt, synthetic construct
  source 1..19: mol_type = other RNA
atcaaagccatcaaaggca

SEQ ID NO: 2925 - RNA, 19 nt, synthetic construct
  source 1..19: mol_type = other RNA
aatcaaagccatcaaaggc

SEQ ID NO: 2926 - RNA, 19 nt, synthetic construct
  source 1..19: mol_type = other RNA
aaatcaaagccatcaaagg

SEQ ID NO: 2927 - RNA, 19 nt, synthetic construct
  source 1..19: mol_type = other RNA
aaaatcaaagccatcaaag

SEQ ID NO: 2928 - RNA, 19 nt, synthetic construct
  source 1..19: mol_type = other RNA
caaaatcaaagccatcaaa

SEQ ID NO: 2929 - RNA, 19 nt, synthetic construct
  source 1..19: mol_type = other RNA
ccaaaatcaaagccatcaa

SEQ ID NO: 2930 - RNA, 19 nt, synthetic construct
  source 1..19: mol_type = other RNA
gccaaaatcaaagccatca

SEQ ID NO: 2931 - RNA, 19 nt, synthetic construct
  source 1..19: mol_type = other RNA
cgccaaaatcaaagccatc

SEQ ID NO: 2932 - RNA, 19 nt, synthetic construct
  source 1..19: mol_type = other RNA
tcgccaaaatcaaagccat

SEQ ID NO: 2933 - RNA, 19 nt, synthetic construct
  source 1..19: mol_type = other RNA
atcgccaaaatcaaagcca

SEQ ID NO: 2934 - RNA, 19 nt, synthetic construct
  source 1..19: mol_type = other RNA
catcgccaaaatcaaagcc

SEQ ID NO: 2935 - RNA, 19 nt, synthetic construct
  source 1..19: mol_type = other RNA
tcatcgccaaaatcaaagc

SEQ ID NO: 2936 - RNA, 19 nt, synthetic construct
  source 1..19: mol_type = other RNA
atcatcgccaaaatcaaag

SEQ ID NO: 2937 - RNA, 19 nt, synthetic construct
  source 1..19: mol_type = other RNA
gatcatcgccaaaatcaaa

SEQ ID NO: 2938 - RNA, 19 nt, synthetic construct
  source 1..19: mol_type = other RNA
ggatcatcgccaaaatcaa

SEQ ID NO: 2939 - RNA, 19 nt, synthetic construct
  source 1..19: mol_type = other RNA
aggatcatcgccaaaatca

SEQ ID NO: 2940 - RNA, 19 nt, synthetic construct
  source 1..19: mol_type = other RNA
taggatcatcgccaaaatc

SEQ ID NO: 2941 - RNA, 19 nt, synthetic construct
  source 1..19: mol_type = other RNA
ctaggatcatcgccaaaat

SEQ ID NO: 2942 - RNA, 19 nt, synthetic construct
  source 1..19: mol_type = other RNA
actaggatcatcgccaaaa

SEQ ID NO: 2943 - RNA, 19 nt, synthetic construct
  source 1..19: mol_type = other RNA
cactaggatcatcgccaaa

SEQ ID NO: 2944 - RNA, 19 nt, synthetic construct
  source 1..19: mol_type = other RNA
tcactaggatcatcgccaa

SEQ ID NO: 2945 - RNA, 19 nt, synthetic construct
  source 1..19: mol_type = other RNA
gtcactaggatcatcgcca

SEQ ID NO: 2946 - RNA, 19 nt, synthetic construct
  source 1..19: mol_type = other RNA
tgtcactaggatcatcgcc

SEQ ID NO: 2947 - RNA, 19 nt, synthetic construct
  source 1..19: mol_type = other RNA
ttgtcactaggatcatcgc

SEQ ID NO: 2948 - RNA, 19 nt, synthetic construct
  source 1..19: mol_type = other RNA
cttgtcactaggatcatcg

SEQ ID NO: 2949 - RNA, 19 nt, synthetic construct
  source 1..19: mol_type = other RNA
acttgtcactaggatcatc

SEQ ID NO: 2950 - RNA, 19 nt, synthetic construct
  source 1..19: mol_type = other RNA
aacttgtcactaggatcat

SEQ ID NO: 2951 - RNA, 19 nt, synthetic construct
  source 1..19: mol_type = other RNA
aaacttgtcactaggatca

SEQ ID NO: 2952 - RNA, 19 nt, synthetic construct
  source 1..19: mol_type = other RNA
aaaacttgtcactaggatc

SEQ ID NO: 2953 - RNA, 19 nt, synthetic construct
  source 1..19: mol_type = other RNA
aaaaacttgtcactaggat

SEQ ID NO: 2954 - RNA, 19 nt, synthetic construct
  source 1..19: mol_type = other RNA
gaaaaacttgtcactagga

SEQ ID NO: 2955 - RNA, 19 nt, synthetic construct
  source 1..19: mol_type = other RNA
tgaaaaacttgtcactagg

SEQ ID NO: 2956 - RNA, 19 nt, synthetic construct
  source 1..19: mol_type = other RNA
gtgaaaaacttgtcactag

SEQ ID NO: 2957 - RNA, 19 nt, synthetic construct
  source 1..19: mol_type = other RNA
tgtgaaaaacttgtcacta

SEQ ID NO: 2958 - RNA, 19 nt, synthetic construct
  source 1..19: mol_type = other RNA
atgtgaaaaacttgtcact

SEQ ID NO: 2959 - RNA, 19 nt, synthetic construct
  source 1..19: mol_type = other RNA
gatgtgaaaaacttgtcac

SEQ ID NO: 2960 - RNA, 19 nt, synthetic construct
  source 1..19: mol_type = other RNA
ggatgtgaaaaacttgtca

SEQ ID NO: 2961 - RNA, 19 nt, synthetic construct
  source 1..19: mol_type = other RNA
gggatgtgaaaaacttgtc

SEQ ID NO: 2962 - RNA, 19 nt, synthetic construct
  source 1..19: mol_type = other RNA
tgggatgtgaaaaacttgt

SEQ ID NO: 2963 - RNA, 19 nt, synthetic construct
  source 1..19: mol_type = other RNA
atgggatgtgaaaaacttg

SEQ ID NO: 2964 - RNA, 19 nt, synthetic construct
  source 1..19: mol_type = other RNA
tatgggatgtgaaaaactt

SEQ ID NO: 2965 - RNA, 19 nt, synthetic construct
  source 1..19: mol_type = other RNA
ttatgggatgtgaaaaact

SEQ ID NO: 2966 - RNA, 19 nt, synthetic construct
  source 1..19: mol_type = other RNA
attatgggatgtgaaaaac

SEQ ID NO: 2967 - RNA, 19 nt, synthetic construct
  source 1..19: mol_type = other RNA
cattatgggatgtgaaaaa

SEQ ID NO: 2968 - RNA, 19 nt, synthetic construct
  source 1..19: mol_type = other RNA
ccattatgggatgtgaaaa

SEQ ID NO: 2969 - RNA, 19 nt, synthetic construct
  source 1..19: mol_type = other RNA
gccattatgggatgtgaaa

SEQ ID NO: 2970 - RNA, 19 nt, synthetic construct
  source 1..19: mol_type = other RNA
tgccattatgggatgtgaa

SEQ ID NO: 2971 - RNA, 19 nt, synthetic construct
  source 1..19: mol_type = other RNA
atgccattatgggatgtga

SEQ ID NO: 2972 - RNA, 19 nt, synthetic construct
  source 1..19: mol_type = other RNA
catgccattatgggatgtg

SEQ ID NO: 2973 - RNA, 19 nt, synthetic construct
  source 1..19: mol_type = other RNA
gcatgccattatgggatgt

SEQ ID NO: 2974 - RNA, 19 nt, synthetic construct
  source 1..19: mol_type = other RNA
tgcatgccattatgggatg

SEQ ID NO: 2975 - RNA, 19 nt, synthetic construct
  source 1..19: mol_type = other RNA
ctgcatgccattatgggat

SEQ ID NO: 2976 - RNA, 19 nt, synthetic construct
  source 1..19: mol_type = other RNA
actgcatgccattatggga

SEQ ID NO: 2977 - RNA, 19 nt, synthetic construct
  source 1..19: mol_type = other RNA
aactgcatgccattatggg

SEQ ID NO: 2978 - RNA, 19 nt, synthetic construct
  source 1..19: mol_type = other RNA
gaactgcatgccattatgg

SEQ ID NO: 2979 - RNA, 19 nt, synthetic construct
  source 1..19: mol_type = other RNA
tgaactgcatgccattatg

SEQ ID NO: 2980 - RNA, 19 nt, synthetic construct
  source 1..19: mol_type = other RNA
ctgaactgcatgccattat

SEQ ID NO: 2981 - RNA, 19 nt, synthetic construct
  source 1..19: mol_type = other RNA
actgaactgcatgccatta

SEQ ID NO: 2982 - RNA, 19 nt, synthetic construct
  source 1..19: mol_type = other RNA
tactgaactgcatgccatt

SEQ ID NO: 2983 - RNA, 19 nt, synthetic construct
  source 1..19: mol_type = other RNA
gtactgaactgcatgccat

SEQ ID NO: 2984 - RNA, 19 nt, synthetic construct
  source 1..19: mol_type = other RNA
ggtactgaactgcatgcca

SEQ ID NO: 2985 - RNA, 19 nt, synthetic construct
  source 1..19: mol_type = other RNA
aggtactgaactgcatgcc

SEQ ID NO: 2986 - RNA, 19 nt, synthetic construct
  source 1..19: mol_type = other RNA
caggtactgaactgcatgc

SEQ ID NO: 2987 - RNA, 19 nt, synthetic construct
  source 1..19: mol_type = other RNA
ccaggtactgaactgcatg

SEQ ID NO: 2988 - RNA, 19 nt, synthetic construct
  source 1..19: mol_type = other RNA
cccaggtactgaactgcat

SEQ ID NO: 2989 - RNA, 19 nt, synthetic construct
  source 1..19: mol_type = other RNA
tcccaggtactgaactgca

SEQ ID NO: 2990 - RNA, 19 nt, synthetic construct
  source 1..19: mol_type = other RNA
gtcccaggtactgaactgc

SEQ ID NO: 2991 - RNA, 19 nt, synthetic construct
  source 1..19: mol_type = other RNA
tgtcccaggtactgaactg

SEQ ID NO: 2992 - RNA, 19 nt, synthetic construct
  source 1..19: mol_type = other RNA
ttgtcccaggtactgaact

SEQ ID NO: 2993 - RNA, 19 nt, synthetic construct
  source 1..19: mol_type = other RNA
attgtcccaggtactgaac

SEQ ID NO: 2994 - RNA, 19 nt, synthetic construct
  source 1..19: mol_type = other RNA
cattgtcccaggtactgaa

SEQ ID NO: 2995 - RNA, 19 nt, synthetic construct
  source 1..19: mol_type = other RNA
tcattgtcccaggtactga

SEQ ID NO: 2996 - RNA, 19 nt, synthetic construct
  source 1..19: mol_type = other RNA
gtcattgtcccaggtactg

SEQ ID NO: 2997 - RNA, 19 nt, synthetic construct
  source 1..19: mol_type = other RNA
tgtcattgtcccaggtact

SEQ ID NO: 2998 - RNA, 19 nt, synthetic construct
  source 1..19: mol_type = other RNA
ttgtcattgtcccaggtac

SEQ ID NO: 2999 - RNA, 19 nt, synthetic construct
  source 1..19: mol_type = other RNA
attgtcattgtcccaggta

SEQ ID NO: 3000 - RNA, 19 nt, synthetic construct
  source 1..19: mol_type = other RNA
cattgtcattgtcccaggt

SEQ ID NO: 3001 - RNA, 19 nt, synthetic construct
  source 1..19: mol_type = other RNA
tcattgtcattgtcccagg

SEQ ID NO: 3002 - RNA, 19 nt, synthetic construct
  source 1..19: mol_type = other RNA
atcattgtcattgtcccag

SEQ ID NO: 3003 - RNA, 19 nt, synthetic construct
  source 1..19: mol_type = other RNA
tatcattgtcattgtccca

SEQ ID NO: 3004 - RNA, 19 nt, synthetic construct
  source 1..19: mol_type = other RNA
ttatcattgtcattgtccc

SEQ ID NO: 3005 - RNA, 19 nt, synthetic construct
  source 1..19: mol_type = other RNA
cttatcattgtcattgtcc

SEQ ID NO: 3006 - RNA, 19 nt, synthetic construct
  source 1..19: mol_type = other RNA
acttatcattgtcattgtc

SEQ ID NO: 3007 - RNA, 19 nt, synthetic construct
  source 1..19: mol_type = other RNA
aacttatcattgtcattgt

SEQ ID NO: 3008 - RNA, 19 nt, synthetic construct
  source 1..19: mol_type = other RNA
aaacttatcattgtcattg

SEQ ID NO: 3009 - RNA, 19 nt, synthetic construct
  source 1..19: mol_type = other RNA
caaacttatcattgtcatt

SEQ ID NO: 3010 - RNA, 19 nt, synthetic construct
  source 1..19: mol_type = other RNA
tcaaacttatcattgtcat

SEQ ID NO: 3011 - RNA, 19 nt, synthetic construct
  source 1..19: mol_type = other RNA
ttcaaacttatcattgtca

SEQ ID NO: 3012 - RNA, 19 nt, synthetic construct
  source 1..19: mol_type = other RNA
cttcaaacttatcattgtc

SEQ ID NO: 3013 - RNA, 19 nt, synthetic construct
  source 1..19: mol_type = other RNA
ccttcaaacttatcattgt

SEQ ID NO: 3014 - RNA, 19 nt, synthetic construct
  source 1..19: mol_type = other RNA
gccttcaaacttatcattg

SEQ ID NO: 3015 - RNA, 19 nt, synthetic construct
  source 1..19: mol_type = other RNA
tgccttcaaacttatcatt

SEQ ID NO: 3016 - RNA, 19 nt, synthetic construct
  source 1..19: mol_type = other RNA
ttgccttcaaacttatcat

SEQ ID NO: 3017 - RNA, 19 nt, synthetic construct
  source 1..19: mol_type = other RNA
gttgccttcaaacttatca

SEQ ID NO: 3018 - RNA, 19 nt, synthetic construct
  source 1..19: mol_type = other RNA
agttgccttcaaacttatc

SEQ ID NO: 3019 - RNA, 19 nt, synthetic construct
  source 1..19: mol_type = other RNA
cagttgccttcaaacttat

SEQ ID NO: 3020 - RNA, 19 nt, synthetic construct
  source 1..19: mol_type = other RNA
acagttgccttcaaactta

SEQ ID NO: 3021 - RNA, 19 nt, synthetic construct
  source 1..19: mol_type = other RNA
cacagttgccttcaaactt

SEQ ID NO: 3022 - RNA, 19 nt, synthetic construct
  source 1..19: mol_type = other RNA
gcacagttgccttcaaact

SEQ ID NO: 3023 - RNA, 19 nt, synthetic construct
  source 1..19: mol_type = other RNA
agcacagttgccttcaaac

SEQ ID NO: 3024 - RNA, 19 nt, synthetic construct
  source 1..19: mol_type = other RNA
cagcacagttgccttcaaa

SEQ ID NO: 3025 - RNA, 19 nt, synthetic construct
  source 1..19: mol_type = other RNA
tcagcacagttgccttcaa

SEQ ID NO: 3026 - RNA, 19 nt, synthetic construct
  source 1..19: mol_type = other RNA
ttcagcacagttgccttca

SEQ ID NO: 3027 - RNA, 19 nt, synthetic construct
  source 1..19: mol_type = other RNA
gttcagcacagttgccttc

SEQ ID NO: 3028 - RNA, 19 nt, synthetic construct
  source 1..19: mol_type = other RNA
tgttcagcacagttgcctt

SEQ ID NO: 3029 - RNA, 19 nt, synthetic construct
  source 1..19: mol_type = other RNA
ctgttcagcacagttgcct

SEQ ID NO: 3030 - RNA, 19 nt, synthetic construct
  source 1..19: mol_type = other RNA
cctgttcagcacagttgcc

SEQ ID NO: 3031 - RNA, 19 nt, synthetic construct
  source 1..19: mol_type = other RNA
tcctgttcagcacagttgc

SEQ ID NO: 3032 - RNA, 19 nt, synthetic construct
  source 1..19: mol_type = other RNA
atcctgttcagcacagttg

SEQ ID NO: 3033 - RNA, 19 nt, synthetic construct
  source 1..19: mol_type = other RNA
catcctgttcagcacagtt

SEQ ID NO: 3034 - RNA, 19 nt, synthetic construct
  source 1..19: mol_type = other RNA
ccatcctgttcagcacagt

SEQ ID NO: 3035 - RNA, 19 nt, synthetic construct
  source 1..19: mol_type = other RNA
tccatcctgttcagcacag

SEQ ID NO: 3036 - RNA, 19 nt, synthetic construct
  source 1..19: mol_type = other RNA
atccatcctgttcagcaca

SEQ ID NO: 3037 - RNA, 19 nt, synthetic construct
  source 1..19: mol_type = other RNA
gatccatcctgttcagcac

SEQ ID NO: 3038 - RNA, 19 nt, synthetic construct
  source 1..19: mol_type = other RNA
agatccatcctgttcagca

SEQ ID NO: 3039 - RNA, 19 nt, synthetic construct
  source 1..19: mol_type = other RNA
cagatccatcctgttcagc

SEQ ID NO: 3040 - RNA, 19 nt, synthetic construct
  source 1..19: mol_type = other RNA
ccagatccatcctgttcag

SEQ ID NO: 3041 - RNA, 19 nt, synthetic construct
  source 1..19: mol_type = other RNA
accagatccatcctgttca

SEQ ID NO: 3042 - RNA, 19 nt, synthetic construct
  source 1..19: mol_type = other RNA
aaccagatccatcctgttc

SEQ ID NO: 3043 - RNA, 19 nt, synthetic construct
  source 1..19: mol_type = other RNA
caaccagatccatcctgtt

SEQ ID NO: 3044 - RNA, 19 nt, synthetic construct
  source 1..19: mol_type = other RNA
ccaaccagatccatcctgt

SEQ ID NO: 3045 - RNA, 19 nt, synthetic construct
  source 1..19: mol_type = other RNA
accaaccagatccatcctg

SEQ ID NO: 3046 - RNA, 19 nt, synthetic construct
  source 1..19: mol_type = other RNA
caccaaccagatccatcct

SEQ ID NO: 3047 - RNA, 19 nt, synthetic construct
  source 1..19: mol_type = other RNA
ccaccaaccagatccatcc

SEQ ID NO: 3048 - RNA, 19 nt, synthetic construct
  source 1..19: mol_type = other RNA
tccaccaaccagatccatc

SEQ ID NO: 3049 - RNA, 19 nt, synthetic construct
  source 1..19: mol_type = other RNA
atccaccaaccagatccat

SEQ ID NO: 3050 - RNA, 19 nt, synthetic construct
  source 1..19: mol_type = other RNA
catccaccaaccagatcca

SEQ ID NO: 3051 - RNA, 19 nt, synthetic construct
  source 1..19: mol_type = other RNA
tcatccaccaaccagatcc

SEQ ID NO: 3052 - RNA, 19 nt, synthetic construct
  source 1..19: mol_type = other RNA
ttcatccaccaaccagatc

SEQ ID NO: 3053 - RNA, 19 nt, synthetic construct
  source 1..19: mol_type = other RNA
gttcatccaccaaccagat

SEQ ID NO: 3054 - RNA, 19 nt, synthetic construct
  source 1..19: mol_type = other RNA
tgttcatccaccaaccaga

SEQ ID NO: 3055 - RNA, 19 nt, synthetic construct
  source 1..19: mol_type = other RNA
ttgttcatccaccaaccag

SEQ ID NO: 3056 - RNA, 19 nt, synthetic construct
  source 1..19: mol_type = other RNA
cttgttcatccaccaacca

SEQ ID NO: 3057 - RNA, 19 nt, synthetic construct
  source 1..19: mol_type = other RNA
acttgttcatccaccaacc

SEQ ID NO: 3058 - RNA, 19 nt, synthetic construct
  source 1..19: mol_type = other RNA
cacttgttcatccaccaac

SEQ ID NO: 3059 - RNA, 19 nt, synthetic construct
  source 1..19: mol_type = other RNA
acacttgttcatccaccaa

SEQ ID NO: 3060 - RNA, 19 nt, synthetic construct
  source 1..19: mol_type = other RNA
gacacttgttcatccacca

SEQ ID NO: 3061 - RNA, 19 nt, synthetic construct
  source 1..19: mol_type = other RNA
tgacacttgttcatccacc

SEQ ID NO: 3062 - RNA, 19 nt, synthetic construct
  source 1..19: mol_type = other RNA
gtgacacttgttcatccac

SEQ ID NO: 3063 - RNA, 19 nt, synthetic construct
  source 1..19: mol_type = other RNA
cgtgacacttgttcatcca

SEQ ID NO: 3064 - RNA, 19 nt, synthetic construct
  source 1..19: mol_type = other RNA
gcgtgacacttgttcatcc

SEQ ID NO: 3065 - RNA, 19 nt, synthetic construct
  source 1..19: mol_type = other RNA
agcgtgacacttgttcatc

SEQ ID NO: 3066 - RNA, 19 nt, synthetic construct
  source 1..19: mol_type = other RNA
cagcgtgacacttgttcat

SEQ ID NO: 3067 - RNA, 19 nt, synthetic construct
  source 1..19: mol_type = other RNA
ccagcgtgacacttgttca

SEQ ID NO: 3068 - RNA, 19 nt, synthetic construct
  source 1..19: mol_type = other RNA
gccagcgtgacacttgttc

SEQ ID NO: 3069 - RNA, 19 nt, synthetic construct
  source 1..19: mol_type = other RNA
ggccagcgtgacacttgtt

SEQ ID NO: 3070 - RNA, 19 nt, synthetic construct
  source 1..19: mol_type = other RNA
tggccagcgtgacacttgt

SEQ ID NO: 3071 - RNA, 19 nt, synthetic construct
  source 1..19: mol_type = other RNA
atggccagcgtgacacttg

SEQ ID NO: 3072 - RNA, 19 nt, synthetic construct
  source 1..19: mol_type = other RNA
gatggccagcgtgacactt

SEQ ID NO: 3073 - RNA, 19 nt, synthetic construct
  source 1..19: mol_type = other RNA
agatggccagcgtgacact

SEQ ID NO: 3074 - RNA, 19 nt, synthetic construct
  source 1..19: mol_type = other RNA
gagatggccagcgtgacac

SEQ ID NO: 3075 - RNA, 19 nt, synthetic construct
  source 1..19: mol_type = other RNA
tgagatggccagcgtgaca

SEQ ID NO: 3076 - RNA, 19 nt, synthetic construct
  source 1..19: mol_type = other RNA
ttgagatggccagcgtgac

SEQ ID NO: 3077 - RNA, 19 nt, synthetic construct
  source 1..19: mol_type = other RNA
attgagatggccagcgtga

SEQ ID NO: 3078 - RNA, 19 nt, synthetic construct
  source 1..19: mol_type = other RNA
cattgagatggccagcgtg

SEQ ID NO: 3079 - RNA, 19 nt, synthetic construct
  source 1..19: mol_type = other RNA
ccattgagatggccagcgt

SEQ ID NO: 3080 - RNA, 19 nt, synthetic construct
  source 1..19: mol_type = other RNA
tccattgagatggccagcg

SEQ ID NO: 3081 - RNA, 19 nt, synthetic construct
  source 1..19: mol_type = other RNA
ctccattgagatggccagc

SEQ ID NO: 3082 - RNA, 19 nt, synthetic construct
  source 1..19: mol_type = other RNA
actccattgagatggccag

SEQ ID NO: 3083 - RNA, 19 nt, synthetic construct
  source 1..19: mol_type = other RNA
aactccattgagatggcca

SEQ ID NO: 3084 - RNA, 19 nt, synthetic construct
  source 1..19: mol_type = other RNA
aaactccattgagatggcc

SEQ ID NO: 3085 - RNA, 19 nt, synthetic construct
  source 1..19: mol_type = other RNA
taaactccattgagatggc

SEQ ID NO: 3086 - RNA, 19 nt, synthetic construct
  source 1..19: mol_type = other RNA
ataaactccattgagatgg

SEQ ID NO: 3087 - RNA, 19 nt, synthetic construct
  source 1..19: mol_type = other RNA
aataaactccattgagatg

SEQ ID NO: 3088 - RNA, 19 nt, synthetic construct
  source 1..19: mol_type = other RNA
taataaactccattgagat

SEQ ID NO: 3089 - RNA, 19 nt, synthetic construct
  source 1..19: mol_type = other RNA
gtaataaactccattgaga

SEQ ID NO: 3090 - DNA, 19 bp, synthetic construct
  source 1..19: mol_type = other DNA
ggtaataaactccattgag

SEQ ID NO: 3091 - RNA, 19 nt, synthetic construct
  source 1..19: mol_type = other RNA
tggtaataaactccattga

SEQ ID NO: 3092 - RNA, 19 nt, synthetic construct
  source 1..19: mol_type = other RNA
ttggtaataaactccattg

SEQ ID NO: 3093 - RNA, 19 nt, synthetic construct
  source 1..19: mol_type = other RNA
cttggtaataaactccatt

SEQ ID NO: 3094 - RNA, 19 nt, synthetic construct
  source 1..19: mol_type = other RNA
ccttggtaataaactccat

SEQ ID NO: 3095 - RNA, 19 nt, synthetic construct
  source 1..19: mol_type = other RNA
accttggtaataaactcca

SEQ ID NO: 3096 - RNA, 19 nt, synthetic construct
  source 1..19: mol_type = other RNA
caccttggtaataaactcc

SEQ ID NO: 3097 - RNA, 19 nt, synthetic construct
  source 1..19: mol_type = other RNA
ccaccttggtaataaactc

SEQ ID NO: 3098 - RNA, 19 nt, synthetic construct
  source 1..19: mol_type = other RNA
gccaccttggtaataaact

SEQ ID NO: 3099 - RNA, 19 nt, synthetic construct
  source 1..19: mol_type = other RNA
tgccaccttggtaataaac

SEQ ID NO: 3100 - RNA, 19 nt, synthetic construct
  source 1..19: mol_type = other RNA
gtgccaccttggtaataaa

SEQ ID NO: 3101 - RNA, 19 nt, synthetic construct
  source 1..19: mol_type = other RNA
agtgccaccttggtaataa

SEQ ID NO: 3102 - RNA, 19 nt, synthetic construct
  source 1..19: mol_type = other RNA
aagtgccaccttggtaata

SEQ ID NO: 3103 - RNA, 19 nt, synthetic construct
  source 1..19: mol_type = other RNA
taagtgccaccttggtaat

SEQ ID NO: 3104 - RNA, 19 nt, synthetic construct
  source 1..19: mol_type = other RNA
gtaagtgccaccttggtaa

SEQ ID NO: 3105 - RNA, 19 nt, synthetic construct
  source 1..19: mol_type = other RNA
agtaagtgccaccttggta

SEQ ID NO: 3106 - RNA, 19 nt, synthetic construct
  source 1..19: mol_type = other RNA
gagtaagtgccaccttggt

SEQ ID NO: 3107 - RNA, 19 nt, synthetic construct
  source 1..19: mol_type = other RNA
tgagtaagtgccaccttgg

SEQ ID NO: 3108 - RNA, 19 nt, synthetic construct
  source 1..19: mol_type = other RNA
ttgagtaagtgccaccttg

SEQ ID NO: 3109 - RNA, 19 nt, synthetic construct
  source 1..19: mol_type = other RNA
tttgagtaagtgccacctt

SEQ ID NO: 3110 - RNA, 19 nt, synthetic construct
  source 1..19: mol_type = other RNA
ttttgagtaagtgccacct

SEQ ID NO: 3111 - RNA, 19 nt, synthetic construct
  source 1..19: mol_type = other RNA
cttttgagtaagtgccacc

SEQ ID NO: 3112 - RNA, 19 nt, synthetic construct
  source 1..19: mol_type = other RNA
gcttttgagtaagtgccac

SEQ ID NO: 3113 - RNA, 19 nt, synthetic construct
  source 1..19: mol_type = other RNA
tgcttttgagtaagtgcca

SEQ ID NO: 3114 - RNA, 19 nt, synthetic construct
  source 1..19: mol_type = other RNA
atgcttttgagtaagtgcc

SEQ ID NO: 3115 - RNA, 19 nt, synthetic construct
  source 1..19: mol_type = other RNA
gatgcttttgagtaagtgc

SEQ ID NO: 3116 - RNA, 19 nt, synthetic construct
  source 1..19: mol_type = other RNA
agatgcttttgagtaagtg

SEQ ID NO: 3117 - RNA, 19 nt, synthetic construct
  source 1..19: mol_type = other RNA
tagatgcttttgagtaagt

SEQ ID NO: 3118 - RNA, 19 nt, synthetic construct
  source 1..19: mol_type = other RNA
gtagatgcttttgagtaag

SEQ ID NO: 3119 - RNA, 19 nt, synthetic construct
  source 1..19: mol_type = other RNA
agtagatgcttttgagtaa

SEQ ID NO: 3120 - RNA, 19 nt, synthetic construct
  source 1..19: mol_type = other RNA
gagtagatgcttttgagta

SEQ ID NO: 3121 - RNA, 19 nt, synthetic construct
  source 1..19: mol_type = other RNA
ggagtagatgcttttgagt

SEQ ID NO: 3122 - RNA, 19 nt, synthetic construct
  source 1..19: mol_type = other RNA
aggagtagatgcttttgag

SEQ ID NO: 3123 - RNA, 19 nt, synthetic construct
  source 1..19: mol_type = other RNA
taggagtagatgcttttga

SEQ ID NO: 3124 - RNA, 19 nt, synthetic construct
  source 1..19: mol_type = other RNA
ttaggagtagatgcttttg

SEQ ID NO: 3125 - RNA, 19 nt, synthetic construct
  source 1..19: mol_type = other RNA
attaggagtagatgctttt

SEQ ID NO: 3126 - RNA, 19 nt, synthetic construct
  source 1..19: mol_type = other RNA
cattaggagtagatgcttt

SEQ ID NO: 3127 - RNA, 19 nt, synthetic construct
  source 1..19: mol_type = other RNA
ccattaggagtagatgctt

SEQ ID NO: 3128 - RNA, 19 nt, synthetic construct
  source 1..19: mol_type = other RNA
accattaggagtagatgct

SEQ ID NO: 3129 - RNA, 19 nt, synthetic construct
  source 1..19: mol_type = other RNA
aaccattaggagtagatgc

SEQ ID NO: 3130 - RNA, 19 nt, synthetic construct
  source 1..19: mol_type = other RNA
taaccattaggagtagatg

SEQ ID NO: 3131 - RNA, 19 nt, synthetic construct
  source 1..19: mol_type = other RNA
ataaccattaggagtagat

SEQ ID NO: 3132 - RNA, 19 nt, synthetic construct
  source 1..19: mol_type = other RNA
cataaccattaggagtaga

SEQ ID NO: 3133 - RNA, 19 nt, synthetic construct
  source 1..19: mol_type = other RNA
tcataaccattaggagtag

SEQ ID NO: 3134 - RNA, 19 nt, synthetic construct
  source 1..19: mol_type = other RNA
atcataaccattaggagta

SEQ ID NO: 3135 - RNA, 19 nt, synthetic construct
  source 1..19: mol_type = other RNA
tatcataaccattaggagt

SEQ ID NO: 3136 - RNA, 19 nt, synthetic construct
  source 1..19: mol_type = other RNA
ttatcataaccattaggag

SEQ ID NO: 3137 - RNA, 19 nt, synthetic construct
  source 1..19: mol_type = other RNA
attatcataaccattagga

SEQ ID NO: 3138 - RNA, 19 nt, synthetic construct
  source 1..19: mol_type = other RNA
cattatcataaccattagg

SEQ ID NO: 3139 - RNA, 19 nt, synthetic construct
  source 1..19: mol_type = other RNA
ccattatcataaccattag

SEQ ID NO: 3140 - RNA, 19 nt, synthetic construct
  source 1..19: mol_type = other RNA
gccattatcataaccatta

SEQ ID NO: 3141 - RNA, 19 nt, synthetic construct
  source 1..19: mol_type = other RNA
tgccattatcataaccatt

SEQ ID NO: 3142 - RNA, 19 nt, synthetic construct
  source 1..19: mol_type = other RNA
atgccattatcataaccat

SEQ ID NO: 3143 - RNA, 19 nt, synthetic construct
  source 1..19: mol_type = other RNA
aatgccattatcataacca

SEQ ID NO: 3144 - RNA, 19 nt, synthetic construct
  source 1..19: mol_type = other RNA
taatgccattatcataacc

SEQ ID NO: 3145 - RNA, 19 nt, synthetic construct
  source 1..19: mol_type = other RNA
ataatgccattatcataac

SEQ ID NO: 3146 - RNA, 19 nt, synthetic construct
  source 1..19: mol_type = other RNA
aataatgccattatcataa

SEQ ID NO: 3147 - RNA, 19 nt, synthetic construct
  source 1..19: mol_type = other RNA
aaataatgccattatcata

SEQ ID NO: 3148 - RNA, 19 nt, synthetic construct
  source 1..19: mol_type = other RNA
caaataatgccattatcat

SEQ ID NO: 3149 - RNA, 19 nt, synthetic construct
  source 1..19: mol_type = other RNA
ccaaataatgccattatca

SEQ ID NO: 3150 - RNA, 19 nt, synthetic construct
  source 1..19: mol_type = other RNA
cccaaataatgccattatc

SEQ ID NO: 3151 - RNA, 19 nt, synthetic construct
  source 1..19: mol_type = other RNA
gcccaaataatgccattat

SEQ ID NO: 3152 - RNA, 19 nt, synthetic construct
  source 1..19: mol_type = other RNA
ggcccaaataatgccatta

SEQ ID NO: 3153 - RNA, 19 nt, synthetic construct
  source 1..19: mol_type = other RNA
tggcccaaataatgccatt

SEQ ID NO: 3154 - RNA, 19 nt, synthetic construct
  source 1..19: mol_type = other RNA
gtggcccaaataatgccat

SEQ ID NO: 3155 - RNA, 19 nt, synthetic construct
  source 1..19: mol_type = other RNA
agtggcccaaataatgcca

SEQ ID NO: 3156 - RNA, 19 nt, synthetic construct
  source 1..19: mol_type = other RNA
aagtggcccaaataatgcc

SEQ ID NO: 3157 - RNA, 19 nt, synthetic construct
  source 1..19: mol_type = other RNA
caagtggcccaaataatgc

SEQ ID NO: 3158 - RNA, 19 nt, synthetic construct
  source 1..19: mol_type = other RNA
ccaagtggcccaaataatg

SEQ ID NO: 3159 - RNA, 19 nt, synthetic construct
  source 1..19: mol_type = other RNA
tccaagtggcccaaataat

SEQ ID NO: 3160 - RNA, 19 nt, synthetic construct
  source 1..19: mol_type = other RNA
ttccaagtggcccaaataa

SEQ ID NO: 3161 - RNA, 19 nt, synthetic construct
  source 1..19: mol_type = other RNA
tttccaagtggcccaaata

SEQ ID NO: 3162 - RNA, 19 nt, synthetic construct
  source 1..19: mol_type = other RNA
ttttccaagtggcccaaat

SEQ ID NO: 3163 - RNA, 19 nt, synthetic construct
  source 1..19: mol_type = other RNA
gttttccaagtggcccaaa

SEQ ID NO: 3164 - RNA, 19 nt, synthetic construct
  source 1..19: mol_type = other RNA
ggttttccaagtggcccaa

SEQ ID NO: 3165 - RNA, 19 nt, synthetic construct
  source 1..19: mol_type = other RNA
gggttttccaagtggccca

SEQ ID NO: 3166 - RNA, 19 nt, synthetic construct
  source 1..19: mol_type = other RNA
cgggttttccaagtggccc

SEQ ID NO: 3167 - RNA, 19 nt, synthetic construct
  source 1..19: mol_type = other RNA
ccgggttttccaagtggcc

SEQ ID NO: 3168 - RNA, 19 nt, synthetic construct
  source 1..19: mol_type = other RNA
accgggttttccaagtggc

SEQ ID NO: 3169 - RNA, 19 nt, synthetic construct
  source 1..19: mol_type = other RNA
caccgggttttccaagtgg

SEQ ID NO: 3170 - RNA, 19 nt, synthetic construct
  source 1..19: mol_type = other RNA
ccaccgggttttccaagtg

SEQ ID NO: 3171 - RNA, 19 nt, synthetic construct
  source 1..19: mol_type = other RNA
accaccgggttttccaagt

SEQ ID NO: 3172 - RNA, 19 nt, synthetic construct
  source 1..19: mol_type = other RNA
taccaccgggttttccaag

SEQ ID NO: 3173 - RNA, 19 nt, synthetic construct
  source 1..19: mol_type = other RNA
ataccaccgggttttccaa

SEQ ID NO: 3174 - RNA, 19 nt, synthetic construct
  source 1..19: mol_type = other RNA
aataccaccgggttttcca

SEQ ID NO: 3175 - RNA, 19 nt, synthetic construct
  source 1..19: mol_type = other RNA
gaataccaccgggttttcc

SEQ ID NO: 3176 - RNA, 19 nt, synthetic construct
  source 1..19: mol_type = other RNA
ggaataccaccgggttttc

SEQ ID NO: 3177 - RNA, 19 nt, synthetic construct
  source 1..19: mol_type = other RNA
tggaataccaccgggtttt

SEQ ID NO: 3178 - RNA, 19 nt, synthetic construct
  source 1..19: mol_type = other RNA
atggaataccaccgggttt

SEQ ID NO: 3179 - RNA, 19 nt, synthetic construct
  source 1..19: mol_type = other RNA
catggaataccaccgggtt

SEQ ID NO: 3180 - RNA, 19 nt, synthetic construct
  source 1..19: mol_type = other RNA
tcatggaataccaccgggt

SEQ ID NO: 3181 - RNA, 19 nt, synthetic construct
  source 1..19: mol_type = other RNA
ttcatggaataccaccggg

SEQ ID NO: 3182 - RNA, 19 nt, synthetic construct
  source 1..19: mol_type = other RNA
cttcatggaataccaccgg

SEQ ID NO: 3183 - RNA, 19 nt, synthetic construct
  source 1..19: mol_type = other RNA
tcttcatggaataccaccg

SEQ ID NO: 3184 - RNA, 19 nt, synthetic construct
  source 1..19: mol_type = other RNA
ttcttcatggaataccacc

SEQ ID NO: 3185 - RNA, 19 nt, synthetic construct
  source 1..19: mol_type = other RNA
tttcttcatggaataccac

SEQ ID NO: 3186 - RNA, 19 nt, synthetic construct
  source 1..19: mol_type = other RNA
ttttcttcatggaatacca

SEQ ID NO: 3187 - RNA, 19 nt, synthetic construct
  source 1..19: mol_type = other RNA
gttttcttcatggaatacc

SEQ ID NO: 3188 - RNA, 19 nt, synthetic construct
  source 1..19: mol_type = other RNA
ggttttcttcatggaatac

SEQ ID NO: 3189 - RNA, 19 nt, synthetic construct
  source 1..19: mol_type = other RNA
tggttttcttcatggaata

SEQ ID NO: 3190 - RNA, 19 nt, synthetic construct
  source 1..19: mol_type = other RNA
gtggttttcttcatggaat

SEQ ID NO: 3191 - RNA, 19 nt, synthetic construct
  source 1..19: mol_type = other RNA
agtggttttcttcatggaa

SEQ ID NO: 3192 - RNA, 19 nt, synthetic construct
  source 1..19: mol_type = other RNA
tagtggttttcttcatgga

SEQ ID NO: 3193 - RNA, 19 nt, synthetic construct
  source 1..19: mol_type = other RNA
atagtggttttcttcatgg

SEQ ID NO: 3194 - RNA, 19 nt, synthetic construct
  source 1..19: mol_type = other RNA
catagtggttttcttcatg

SEQ ID NO: 3195 - RNA, 19 nt, synthetic construct
  source 1..19: mol_type = other RNA
tcatagtggttttcttcat

SEQ ID NO: 3196 - RNA, 19 nt, synthetic construct
  source 1..19: mol_type = other RNA
ttcatagtggttttcttca

SEQ ID NO: 3197 - RNA, 19 nt, synthetic construct
  source 1..19: mol_type = other RNA
cttcatagtggttttcttc

SEQ ID NO: 3198 - RNA, 19 nt, synthetic construct
  source 1..19: mol_type = other RNA
tcttcatagtggttttctt

SEQ ID NO: 3199 - RNA, 19 nt, synthetic construct
  source 1..19: mol_type = other RNA
atcttcatagtggttttct

SEQ ID NO: 3200 - RNA, 19 nt, synthetic construct
  source 1..19: mol_type = other RNA
tatcttcatagtggttttc

SEQ ID NO: 3201 - RNA, 19 nt, synthetic construct
  source 1..19: mol_type = other RNA
ttatcttcatagtggtttt

SEQ ID NO: 3202 - RNA, 19 nt, synthetic construct
  source 1..19: mol_type = other RNA
attatcttcatagtggttt

SEQ ID NO: 3203 - RNA, 19 nt, synthetic construct
  source 1..19: mol_type = other RNA
gattatcttcatagtggtt

SEQ ID NO: 3204 - RNA, 19 nt, synthetic construct
  source 1..19: mol_type = other RNA
ggattatcttcatagtggt

SEQ ID NO: 3205 - RNA, 19 nt, synthetic construct
  source 1..19: mol_type = other RNA
gggattatcttcatagtgg

SEQ ID NO: 3206 - RNA, 19 nt, synthetic construct
  source 1..19: mol_type = other RNA
tgggattatcttcatagtg

SEQ ID NO: 3207 - RNA, 19 nt, synthetic construct
  source 1..19: mol_type = other RNA
atgggattatcttcatagt

SEQ ID NO: 3208 - RNA, 19 nt, synthetic construct
  source 1..19: mol_type = other RNA
aatgggattatcttcatag

SEQ ID NO: 3209 - RNA, 19 nt, synthetic construct
  source 1..19: mol_type = other RNA
gaatgggattatcttcata

SEQ ID NO: 3210 - RNA, 19 nt, synthetic construct
  source 1..19: mol_type = other RNA
tgaatgggattatcttcat

SEQ ID NO: 3211 - RNA, 19 nt, synthetic construct
  source 1..19: mol_type = other RNA
ttgaatgggattatcttca

SEQ ID NO: 3212 - RNA, 19 nt, synthetic construct
  source 1..19: mol_type = other RNA
gttgaatgggattatcttc

SEQ ID NO: 3213 - RNA, 19 nt, synthetic construct
  source 1..19: mol_type = other RNA
tgttgaatgggattatctt

SEQ ID NO: 3214 - RNA, 19 nt, synthetic construct
  source 1..19: mol_type = other RNA
ctgttgaatgggattatct

SEQ ID NO: 3215 - RNA, 19 nt, synthetic construct
  source 1..19: mol_type = other RNA
tctgttgaatgggattatc

SEQ ID NO: 3216 - RNA, 19 nt, synthetic construct
  source 1..19: mol_type = other RNA
gtctgttgaatgggattat

SEQ ID NO: 3217 - RNA, 19 nt, synthetic construct
  source 1..19: mol_type = other RNA
agtctgttgaatgggatta

SEQ ID NO: 3218 - RNA, 19 nt, synthetic construct
  source 1..19: mol_type = other RNA
gagtctgttgaatgggatt

SEQ ID NO: 3219 - RNA, 19 nt, synthetic construct
  source 1..19: mol_type = other RNA
tgagtctgttgaatgggat

SEQ ID NO: 3220 - RNA, 19 nt, synthetic construct
  source 1..19: mol_type = other RNA
gtgagtctgttgaatggga

SEQ ID NO: 3221 - RNA, 19 nt, synthetic construct
  source 1..19: mol_type = other RNA
tgtgagtctgttgaatggg

SEQ ID NO: 3222 - RNA, 19 nt, synthetic construct
  source 1..19: mol_type = other RNA
ttgtgagtctgttgaatgg

SEQ ID NO: 3223 - RNA, 19 nt, synthetic construct
  source 1..19: mol_type = other RNA
attgtgagtctgttgaatg

SEQ ID NO: 3224 - RNA, 19 nt, synthetic construct
  source 1..19: mol_type = other RNA
aattgtgagtctgttgaat

SEQ ID NO: 3225 - RNA, 19 nt, synthetic construct
  source 1..19: mol_type = other RNA
caattgtgagtctgttgaa

SEQ ID NO: 3226 - RNA, 19 nt, synthetic construct
  source 1..19: mol_type = other RNA
ccaattgtgagtctgttga

SEQ ID NO: 3227 - RNA, 19 nt, synthetic construct
  source 1..19: mol_type = other RNA
tccaattgtgagtctgttg

SEQ ID NO: 3228 - RNA, 19 nt, synthetic construct
  source 1..19: mol_type = other RNA
ctccaattgtgagtctgtt

SEQ ID NO: 3229 - RNA, 19 nt, synthetic construct
  source 1..19: mol_type = other RNA
tctccaattgtgagtctgt

SEQ ID NO: 3230 - RNA, 19 nt, synthetic construct
  source 1..19: mol_type = other RNA
ttctccaattgtgagtctg

SEQ ID NO: 3231 - RNA, 19 nt, synthetic construct
  source 1..19: mol_type = other RNA
cttctccaattgtgagtct

SEQ ID NO: 3232 - RNA, 19 nt, synthetic construct
  source 1..19: mol_type = other RNA
ccttctccaattgtgagtc

SEQ ID NO: 3233 - RNA, 19 nt, synthetic construct
  source 1..19: mol_type = other RNA
tccttctccaattgtgagt

SEQ ID NO: 3234 - RNA, 19 nt, synthetic construct
  source 1..19: mol_type = other RNA
gtccttctccaattgtgag

SEQ ID NO: 3235 - RNA, 19 nt, synthetic construct
  source 1..19: mol_type = other RNA
tgtccttctccaattgtga

SEQ ID NO: 3236 - RNA, 19 nt, synthetic construct
  source 1..19: mol_type = other RNA
ctgtccttctccaattgtg

SEQ ID NO: 3237 - RNA, 19 nt, synthetic construct
  source 1..19: mol_type = other RNA
gctgtccttctccaattgt

SEQ ID NO: 3238 - RNA, 19 nt, synthetic construct
  source 1..19: mol_type = other RNA
tgctgtccttctccaattg

SEQ ID NO: 3239 - RNA, 19 nt, synthetic construct
  source 1..19: mol_type = other RNA
ttgctgtccttctccaatt

SEQ ID NO: 3240 - RNA, 19 nt, synthetic construct
  source 1..19: mol_type = other RNA
gttgctgtccttctccaat

SEQ ID NO: 3241 - RNA, 19 nt, synthetic construct
  source 1..19: mol_type = other RNA
tgttgctgtccttctccaa

SEQ ID NO: 3242 - RNA, 19 nt, synthetic construct
  source 1..19: mol_type = other RNA
gtgttgctgtccttctcca

SEQ ID NO: 3243 - RNA, 19 nt, synthetic construct
  source 1..19: mol_type = other RNA
ggtgttgctgtccttctcc

SEQ ID NO: 3244 - RNA, 19 nt, synthetic construct
  source 1..19: mol_type = other RNA
tggtgttgctgtccttctc

SEQ ID NO: 3245 - RNA, 19 nt, synthetic construct
  source 1..19: mol_type = other RNA
gtggtgttgctgtccttct

SEQ ID NO: 3246 - RNA, 19 nt, synthetic construct
  source 1..19: mol_type = other RNA
ggtggtgttgctgtccttc

SEQ ID NO: 3247 - RNA, 19 nt, synthetic construct
  source 1..19: mol_type = other RNA
aggtggtgttgctgtcctt

SEQ ID NO: 3248 - RNA, 19 nt, synthetic construct
  source 1..19: mol_type = other RNA
caggtggtgttgctgtcct

SEQ ID NO: 3249 - RNA, 19 nt, synthetic construct
  source 1..19: mol_type = other RNA
ccaggtggtgttgctgtcc

SEQ ID NO: 3250 - RNA, 19 nt, synthetic construct
  source 1..19: mol_type = other RNA
cccaggtggtgttgctgtc

SEQ ID NO: 3251 - RNA, 19 nt, synthetic construct
  source 1..19: mol_type = other RNA
ccccaggtggtgttgctgt

SEQ ID NO: 3252 - RNA, 19 nt, synthetic construct
  source 1..19: mol_type = other RNA
cccccaggtggtgttgctg

SEQ ID NO: 3253 - RNA, 19 nt, synthetic construct
  source 1..19: mol_type = other RNA
ccccccaggtggtgttgct

SEQ ID NO: 3254 - RNA, 19 nt, synthetic construct
  source 1..19: mol_type = other RNA
tccccccaggtggtgttgc

SEQ ID NO: 3255 - RNA, 19 nt, synthetic construct
  source 1..19: mol_type = other RNA
ctccccccaggtggtgttg

SEQ ID NO: 3256 - RNA, 19 nt, synthetic construct
  source 1..19: mol_type = other RNA
gctccccccaggtggtgtt

SEQ ID NO: 3257 - RNA, 19 nt, synthetic construct
  source 1..19: mol_type = other RNA
ggctccccccaggtggtgt

SEQ ID NO: 3258 - RNA, 19 nt, synthetic construct
  source 1..19: mol_type = other RNA
tggctccccccaggtggtg

SEQ ID NO: 3259 - RNA, 19 nt, synthetic construct
  source 1..19: mol_type = other RNA
ttggctccccccaggtggt

SEQ ID NO: 3260 - RNA, 19 nt, synthetic construct
  source 1..19: mol_type = other RNA
tttggctccccccaggtgg

SEQ ID NO: 3261 - RNA, 19 nt, synthetic construct
  source 1..19: mol_type = other RNA
gtttggctccccccaggtg

SEQ ID NO: 3262 - RNA, 19 nt, synthetic construct
  source 1..19: mol_type = other RNA
tgtttggctccccccaggt

SEQ ID NO: 3263 - RNA, 19 nt, synthetic construct
  source 1..19: mol_type = other RNA
ctgtttggctccccccagg

SEQ ID NO: 3264 - RNA, 19 nt, synthetic construct
  source 1..19: mol_type = other RNA
cctgtttggctccccccag

SEQ ID NO: 3265 - RNA, 19 nt, synthetic construct
  source 1..19: mol_type = other RNA
gcctgtttggctcccccca

SEQ ID NO: 3266 - RNA, 19 nt, synthetic construct
  source 1..19: mol_type = other RNA
agcctgtttggctcccccc

SEQ ID NO: 3267 - RNA, 19 nt, synthetic construct
  source 1..19: mol_type = other RNA
cagcctgtttggctccccc

SEQ ID NO: 3268 - RNA, 19 nt, synthetic construct
  source 1..19: mol_type = other RNA
ccagcctgtttggctcccc

SEQ ID NO: 3269 - RNA, 19 nt, synthetic construct
  source 1..19: mol_type = other RNA
tccagcctgtttggctccc

SEQ ID NO: 3270 - RNA, 19 nt, synthetic construct
  source 1..19: mol_type = other RNA
ctccagcctgtttggctcc

SEQ ID NO: 3271 - RNA, 19 nt, synthetic construct
  source 1..19: mol_type = other RNA
tctccagcctgtttggctc

SEQ ID NO: 3272 - RNA, 19 nt, synthetic construct
  source 1..19: mol_type = other RNA
gtctccagcctgtttggct

SEQ ID NO: 3273 - RNA, 19 nt, synthetic construct
  source 1..19: mol_type = other RNA
cgtctccagcctgtttggc

SEQ ID NO: 3274 - RNA, 19 nt, synthetic construct
  source 1..19: mol_type = other RNA
acgtctccagcctgtttgg

SEQ ID NO: 3275 - RNA, 19 nt, synthetic construct
  source 1..19: mol_type = other RNA
aacgtctccagcctgtttg

SEQ ID NO: 3276 - RNA, 19 nt, synthetic construct
  source 1..19: mol_type = other RNA
aaacgtctccagcctgttt

SEQ ID NO: 3277 - RNA, 19 nt, synthetic construct
  source 1..19: mol_type = other RNA
taaacgtctccagcctgtt

SEQ ID NO: 3278 - RNA, 19 nt, synthetic construct
  source 1..19: mol_type = other RNA
ttaaacgtctccagcctgt

SEQ ID NO: 3279 - RNA, 19 nt, synthetic construct
  source 1..19: mol_type = other RNA
tttaaacgtctccagcctg

SEQ ID NO: 3280 - RNA, 19 nt, synthetic construct
  source 1..19: mol_type = other RNA
ttttaaacgtctccagcct

SEQ ID NO: 3281 - RNA, 19 nt, synthetic construct
  source 1..19: mol_type = other RNA
cttttaaacgtctccagcc

SEQ ID NO: 3282 - RNA, 19 nt, synthetic construct
  source 1..19: mol_type = other RNA
tcttttaaacgtctccagc

SEQ ID NO: 3283 - RNA, 19 nt, synthetic construct
  source 1..19: mol_type = other RNA
gtcttttaaacgtctccag

SEQ ID NO: 3284 - RNA, 19 nt, synthetic construct
  source 1..19: mol_type = other RNA
ggtcttttaaacgtctcca

SEQ ID NO: 3285 - RNA, 19 nt, synthetic construct
  source 1..19: mol_type = other RNA
cggtcttttaaacgtctcc

SEQ ID NO: 3286 - RNA, 19 nt, synthetic construct
  source 1..19: mol_type = other RNA
acggtcttttaaacgtctc

SEQ ID NO: 3287 - RNA, 19 nt, synthetic construct
  source 1..19: mol_type = other RNA
aacggtcttttaaacgtct

SEQ ID NO: 3288 - RNA, 19 nt, synthetic construct
  source 1..19: mol_type = other RNA
aaacggtcttttaaacgtc

SEQ ID NO: 3289 - RNA, 19 nt, synthetic construct
  source 1..19: mol_type = other RNA
gaaacggtcttttaaacgt

SEQ ID NO: 3290 - RNA, 19 nt, synthetic construct
  source 1..19: mol_type = other RNA
tgaaacggtcttttaaacg

SEQ ID NO: 3291 - RNA, 19 nt, synthetic construct
  source 1..19: mol_type = other RNA
ttgaaacggtcttttaaac

SEQ ID NO: 3292 - RNA, 19 nt, synthetic construct
  source 1..19: mol_type = other RNA
tttgaaacggtcttttaaa

SEQ ID NO: 3293 - RNA, 19 nt, synthetic construct
  source 1..19: mol_type = other RNA
ttttgaaacggtcttttaa

SEQ ID NO: 3294 - RNA, 19 nt, synthetic construct
  source 1..19: mol_type = other RNA
cttttgaaacggtctttta

SEQ ID NO: 3295 - RNA, 19 nt, synthetic construct
  source 1..19: mol_type = other RNA
tcttttgaaacggtctttt

SEQ ID NO: 3296 - RNA, 19 nt, synthetic construct
  source 1..19: mol_type = other RNA
ctcttttgaaacggtcttt

SEQ ID NO: 3297 - RNA, 19 nt, synthetic construct
  source 1..19: mol_type = other RNA
tctcttttgaaacggtctt

SEQ ID NO: 3298 - RNA, 19 nt, synthetic construct
  source 1..19: mol_type = other RNA
atctcttttgaaacggtct

SEQ ID NO: 3299 - RNA, 19 nt, synthetic construct
  source 1..19: mol_type = other RNA
aatctcttttgaaacggtc

SEQ ID NO: 3300 - RNA, 19 nt, synthetic construct
  source 1..19: mol_type = other RNA
aaatctcttttgaaacggt

SEQ ID NO: 3301 - RNA, 19 nt, synthetic construct
  source 1..19: mol_type = other RNA
taaatctcttttgaaacgg

SEQ ID NO: 3302 - RNA, 19 nt, synthetic construct
  source 1..19: mol_type = other RNA
gtaaatctcttttgaaacg

SEQ ID NO: 3303 - RNA, 19 nt, synthetic construct
  source 1..19: mol_type = other RNA
agtaaatctcttttgaaac

SEQ ID NO: 3304 - RNA, 19 nt, synthetic construct
  source 1..19: mol_type = other RNA
aagtaaatctcttttgaaa

SEQ ID NO: 3305 - RNA, 19 nt, synthetic construct
  source 1..19: mol_type = other RNA
aaagtaaatctcttttgaa

SEQ ID NO: 3306 - RNA, 19 nt, synthetic construct
  source 1..19: mol_type = other RNA
aaaagtaaatctcttttga

SEQ ID NO: 3307 - RNA, 19 nt, synthetic construct
  source 1..19: mol_type = other RNA
aaaaagtaaatctcttttg

SEQ ID NO: 3308 - RNA, 19 nt, synthetic construct
  source 1..19: mol_type = other RNA
aaaaaagtaaatctctttt

SEQ ID NO: 3309 - RNA, 19 nt, synthetic construct
  source 1..19: mol_type = other RNA
taaaaaagtaaatctcttt

SEQ ID NO: 3310 - RNA, 19 nt, synthetic construct
  source 1..19: mol_type = other RNA
ttaaaaaagtaaatctctt

SEQ ID NO: 3311 - RNA, 19 nt, synthetic construct
  source 1..19: mol_type = other RNA
tttaaaaaagtaaatctct

SEQ ID NO: 3312 - RNA, 19 nt, synthetic construct
  source 1..19: mol_type = other RNA
ctttaaaaaagtaaatctc

SEQ ID NO: 3313 - RNA, 19 nt, synthetic construct
  source 1..19: mol_type = other RNA
cctttaaaaaagtaaatct

SEQ ID NO: 3314 - RNA, 19 nt, synthetic construct
  source 1..19: mol_type = other RNA
tcctttaaaaaagtaaatc

SEQ ID NO: 3315 - RNA, 19 nt, synthetic construct
  source 1..19: mol_type = other RNA
gtcctttaaaaaagtaaat

SEQ ID NO: 3316 - RNA, 19 nt, synthetic construct
  source 1..19: mol_type = other RNA
agtcctttaaaaaagtaaa

SEQ ID NO: 3317 - RNA, 19 nt, synthetic construct
  source 1..19: mol_type = other RNA
aagtcctttaaaaaagtaa

SEQ ID NO: 3318 - RNA, 19 nt, synthetic construct
  source 1..19: mol_type = other RNA
aaagtcctttaaaaaagta

SEQ ID NO: 3319 - RNA, 19 nt, synthetic construct
  source 1..19: mol_type = other RNA
taaagtcctttaaaaaagt

SEQ ID NO: 3320 - RNA, 19 nt, synthetic construct
  source 1..19: mol_type = other RNA
ataaagtcctttaaaaaag

SEQ ID NO: 3321 - RNA, 19 nt, synthetic construct
  source 1..19: mol_type = other RNA
gataaagtcctttaaaaaa

SEQ ID NO: 3322 - RNA, 19 nt, synthetic construct
  source 1..19: mol_type = other RNA
agataaagtcctttaaaaa

SEQ ID NO: 3323 - RNA, 19 nt, synthetic construct
  source 1..19: mol_type = other RNA
cagataaagtcctttaaaa

SEQ ID NO: 3324 - RNA, 19 nt, synthetic construct
  source 1..19: mol_type = other RNA
tcagataaagtcctttaaa

SEQ ID NO: 3325 - RNA, 19 nt, synthetic construct
  source 1..19: mol_type = other RNA
ttcagataaagtcctttaa

SEQ ID NO: 3326 - RNA, 19 nt, synthetic construct
  source 1..19: mol_type = other RNA
gttcagataaagtccttta

SEQ ID NO: 3327 - RNA, 19 nt, synthetic construct
  source 1..19: mol_type = other RNA
tgttcagataaagtccttt

SEQ ID NO: 3328 - RNA, 19 nt, synthetic construct
  source 1..19: mol_type = other RNA
ctgttcagataaagtcctt

SEQ ID NO: 3329 - RNA, 19 nt, synthetic construct
  source 1..19: mol_type = other RNA
tctgttcagataaagtcct

SEQ ID NO: 3330 - RNA, 19 nt, synthetic construct
  source 1..19: mol_type = other RNA
ctctgttcagataaagtcc

SEQ ID NO: 3331 - RNA, 19 nt, synthetic construct
  source 1..19: mol_type = other RNA
tctctgttcagataaagtc

SEQ ID NO: 3332 - RNA, 19 nt, synthetic construct
  source 1..19: mol_type = other RNA
ctctctgttcagataaagt

SEQ ID NO: 3333 - RNA, 19 nt, synthetic construct
  source 1..19: mol_type = other RNA
tctctctgttcagataaag

SEQ ID NO: 3334 - RNA, 19 nt, synthetic construct
  source 1..19: mol_type = other RNA
atctctctgttcagataaa

SEQ ID NO: 3335 - RNA, 19 nt, synthetic construct
  source 1..19: mol_type = other RNA
tatctctctgttcagataa

SEQ ID NO: 3336 - RNA, 19 nt, synthetic construct
  source 1..19: mol_type = other RNA
atatctctctgttcagata

SEQ ID NO: 3337 - RNA, 19 nt, synthetic construct
  source 1..19: mol_type = other RNA
tatatctctctgttcagat

SEQ ID NO: 3338 - RNA, 19 nt, synthetic construct
  source 1..19: mol_type = other RNA
ttatatctctctgttcaga

SEQ ID NO: 3339 - RNA, 19 nt, synthetic construct
  source 1..19: mol_type = other RNA
attatatctctctgttcag

SEQ ID NO: 3340 - RNA, 19 nt, synthetic construct
  source 1..19: mol_type = other RNA
tattatatctctctgttca

SEQ ID NO: 3341 - RNA, 19 nt, synthetic construct
  source 1..19: mol_type = other RNA
atattatatctctctgttc

SEQ ID NO: 3342 - RNA, 19 nt, synthetic construct
  source 1..19: mol_type = other RNA
aatattatatctctctgtt

SEQ ID NO: 3343 - RNA, 19 nt, synthetic construct
  source 1..19: mol_type = other RNA
aaatattatatctctctgt

SEQ ID NO: 3344 - RNA, 19 nt, synthetic construct
  source 1..19: mol_type = other RNA
aaaatattatatctctctg

SEQ ID NO: 3345 - RNA, 19 nt, synthetic construct
  source 1..19: mol_type = other RNA
aaaaatattatatctctct

SEQ ID NO: 3346 - RNA, 19 nt, synthetic construct
  source 1..19: mol_type = other RNA
gaaaaatattatatctctc

SEQ ID NO: 3347 - RNA, 19 nt, synthetic construct
  source 1..19: mol_type = other RNA
ggaaaaatattatatctct

SEQ ID NO: 3348 - RNA, 19 nt, synthetic construct
  source 1..19: mol_type = other RNA
aggaaaaatattatatctc

SEQ ID NO: 3349 - RNA, 19 nt, synthetic construct
  source 1..19: mol_type = other RNA
taggaaaaatattatatct

SEQ ID NO: 3350 - RNA, 19 nt, synthetic construct
  source 1..19: mol_type = other RNA
ataggaaaaatattatatc

SEQ ID NO: 3351 - RNA, 19 nt, synthetic construct
  source 1..19: mol_type = other RNA
aataggaaaaatattatat

SEQ ID NO: 3352 - RNA, 19 nt, synthetic construct
  source 1..19: mol_type = other RNA
caataggaaaaatattata

SEQ ID NO: 3353 - RNA, 19 nt, synthetic construct
  source 1..19: mol_type = other RNA
ccaataggaaaaatattat

SEQ ID NO: 3354 - RNA, 19 nt, synthetic construct
  source 1..19: mol_type = other RNA
tccaataggaaaaatatta

SEQ ID NO: 3355 - RNA, 19 nt, synthetic construct
  source 1..19: mol_type = other RNA
gtccaataggaaaaatatt

SEQ ID NO: 3356 - RNA, 19 nt, synthetic construct
  source 1..19: mol_type = other RNA
tgtccaataggaaaaatat

SEQ ID NO: 3357 - RNA, 19 nt, synthetic construct
  source 1..19: mol_type = other RNA
ttgtccaataggaaaaata

SEQ ID NO: 3358 - RNA, 19 nt, synthetic construct
  source 1..19: mol_type = other RNA
attgtccaataggaaaaat

SEQ ID NO: 3359 - RNA, 19 nt, synthetic construct
  source 1..19: mol_type = other RNA
cattgtccaataggaaaaa

SEQ ID NO: 3360 - RNA, 19 nt, synthetic construct
  source 1..19: mol_type = other RNA
ccattgtccaataggaaaa

SEQ ID NO: 3361 - RNA, 19 nt, synthetic construct
  source 1..19: mol_type = other RNA
tccattgtccaataggaaa

SEQ ID NO: 3362 - RNA, 19 nt, synthetic construct
  source 1..19: mol_type = other RNA
gtccattgtccaataggaa

SEQ ID NO: 3363 - RNA, 19 nt, synthetic construct
  source 1..19: mol_type = other RNA
agtccattgtccaatagga

SEQ ID NO: 3364 - RNA, 19 nt, synthetic construct
  source 1..19: mol_type = other RNA
aagtccattgtccaatagg

SEQ ID NO: 3365 - RNA, 19 nt, synthetic construct
  source 1..19: mol_type = other RNA
caagtccattgtccaatag

SEQ ID NO: 3366 - RNA, 19 nt, synthetic construct
  source 1..19: mol_type = other RNA
gcaagtccattgtccaata

SEQ ID NO: 3367 - RNA, 19 nt, synthetic construct
  source 1..19: mol_type = other RNA
tgcaagtccattgtccaat

SEQ ID NO: 3368 - RNA, 19 nt, synthetic construct
  source 1..19: mol_type = other RNA
ttgcaagtccattgtccaa

SEQ ID NO: 3369 - RNA, 19 nt, synthetic construct
  source 1..19: mol_type = other RNA
tttgcaagtccattgtcca

SEQ ID NO: 3370 - RNA, 19 nt, synthetic construct
  source 1..19: mol_type = other RNA
ctttgcaagtccattgtcc

SEQ ID NO: 3371 - RNA, 19 nt, synthetic construct
  source 1..19: mol_type = other RNA
gctttgcaagtccattgtc

SEQ ID NO: 3372 - RNA, 19 nt, synthetic construct
  source 1..19: mol_type = other RNA
agctttgcaagtccattgt

SEQ ID NO: 3373 - RNA, 19 nt, synthetic construct
  source 1..19: mol_type = other RNA
aagctttgcaagtccattg

SEQ ID NO: 3374 - RNA, 19 nt, synthetic construct
  source 1..19: mol_type = other RNA
gaagctttgcaagtccatt

SEQ ID NO: 3375 - RNA, 19 nt, synthetic construct
  source 1..19: mol_type = other RNA
tgaagctttgcaagtccat

SEQ ID NO: 3376 - RNA, 19 nt, synthetic construct
  source 1..19: mol_type = other RNA
gtgaagctttgcaagtcca

SEQ ID NO: 3377 - RNA, 19 nt, synthetic construct
  source 1..19: mol_type = other RNA
agtgaagctttgcaagtcc

SEQ ID NO: 3378 - RNA, 19 nt, synthetic construct
  source 1..19: mol_type = other RNA
aagtgaagctttgcaagtc

SEQ ID NO: 3379 - RNA, 19 nt, synthetic construct
  source 1..19: mol_type = other RNA
gaagtgaagctttgcaagt

SEQ ID NO: 3380 - RNA, 19 nt, synthetic construct
  source 1..19: mol_type = other RNA
tgaagtgaagctttgcaag

SEQ ID NO: 3381 - RNA, 19 nt, synthetic construct
  source 1..19: mol_type = other RNA
atgaagtgaagctttgcaa

SEQ ID NO: 3382 - RNA, 19 nt, synthetic construct
  source 1..19: mol_type = other RNA
aatgaagtgaagctttgca

SEQ ID NO: 3383 - RNA, 19 nt, synthetic construct
  source 1..19: mol_type = other RNA
aaatgaagtgaagctttgc

SEQ ID NO: 3384 - RNA, 19 nt, synthetic construct
  source 1..19: mol_type = other RNA
aaaatgaagtgaagctttg

SEQ ID NO: 3385 - RNA, 19 nt, synthetic construct
  source 1..19: mol_type = other RNA
taaaatgaagtgaagcttt

SEQ ID NO: 3386 - RNA, 19 nt, synthetic construct
  source 1..19: mol_type = other RNA
ttaaaatgaagtgaagctt

SEQ ID NO: 3387 - RNA, 19 nt, synthetic construct
  source 1..19: mol_type = other RNA
cttaaaatgaagtgaagct

SEQ ID NO: 3388 - RNA, 19 nt, synthetic construct
  source 1..19: mol_type = other RNA
tcttaaaatgaagtgaagc

SEQ ID NO: 3389 - RNA, 19 nt, synthetic construct
  source 1..19: mol_type = other RNA
ctcttaaaatgaagtgaag

SEQ ID NO: 3390 - RNA, 19 nt, synthetic construct
  source 1..19: mol_type = other RNA
gctcttaaaatgaagtgaa

SEQ ID NO: 3391 - RNA, 19 nt, synthetic construct
  source 1..19: mol_type = other RNA
tgctcttaaaatgaagtga

SEQ ID NO: 3392 - RNA, 19 nt, synthetic construct
  source 1..19: mol_type = other RNA
ttgctcttaaaatgaagtg

SEQ ID NO: 3393 - RNA, 19 nt, synthetic construct
  source 1..19: mol_type = other RNA
tttgctcttaaaatgaagt

SEQ ID NO: 3394 - RNA, 19 nt, synthetic construct
  source 1..19: mol_type = other RNA
ttttgctcttaaaatgaag

SEQ ID NO: 3395 - RNA, 19 nt, synthetic construct
  source 1..19: mol_type = other RNA
cttttgctcttaaaatgaa

SEQ ID NO: 3396 - RNA, 19 nt, synthetic construct
  source 1..19: mol_type = other RNA
tcttttgctcttaaaatga

SEQ ID NO: 3397 - RNA, 19 nt, synthetic construct
  source 1..19: mol_type = other RNA
gtcttttgctcttaaaatg

SEQ ID NO: 3398 - RNA, 19 nt, synthetic construct
  source 1..19: mol_type = other RNA
ggtcttttgctcttaaaat

SEQ ID NO: 3399 - RNA, 19 nt, synthetic construct
  source 1..19: mol_type = other RNA
gggtcttttgctcttaaaa

SEQ ID NO: 3400 - RNA, 19 nt, synthetic construct
  source 1..19: mol_type = other RNA
ggggtcttttgctcttaaa

SEQ ID NO: 3401 - RNA, 19 nt, synthetic construct
  source 1..19: mol_type = other RNA
tggggtcttttgctcttaa

SEQ ID NO: 3402 - RNA, 19 nt, synthetic construct
  source 1..19: mol_type = other RNA
atggggtcttttgctctta

SEQ ID NO: 3403 - RNA, 19 nt, synthetic construct
  source 1..19: mol_type = other RNA
catggggtcttttgctctt

SEQ ID NO: 3404 - RNA, 19 nt, synthetic construct
  source 1..19: mol_type = other RNA
acatggggtcttttgctct

SEQ ID NO: 3405 - RNA, 19 nt, synthetic construct
  source 1..19: mol_type = other RNA
aacatggggtcttttgctc

SEQ ID NO: 3406 - RNA, 19 nt, synthetic construct
  source 1..19: mol_type = other RNA
caacatggggtcttttgct

SEQ ID NO: 3407 - RNA, 19 nt, synthetic construct
  source 1..19: mol_type = other RNA
tcaacatggggtcttttgc

SEQ ID NO: 3408 - RNA, 19 nt, synthetic construct
  source 1..19: mol_type = other RNA
ttcaacatggggtcttttg

SEQ ID NO: 3409 - RNA, 19 nt, synthetic construct
  source 1..19: mol_type = other RNA
tttcaacatggggtctttt

SEQ ID NO: 3410 - RNA, 19 nt, synthetic construct
  source 1..19: mol_type = other RNA
ttttcaacatggggtcttt

SEQ ID NO: 3411 - RNA, 19 nt, synthetic construct
  source 1..19: mol_type = other RNA
gttttcaacatggggtctt

SEQ ID NO: 3412 - RNA, 19 nt, synthetic construct
  source 1..19: mol_type = other RNA
agttttcaacatggggtct

SEQ ID NO: 3413 - RNA, 19 nt, synthetic construct
  source 1..19: mol_type = other RNA
gagttttcaacatggggtc

SEQ ID NO: 3414 - RNA, 19 nt, synthetic construct
  source 1..19: mol_type = other RNA
ggagttttcaacatggggt

SEQ ID NO: 3415 - RNA, 19 nt, synthetic construct
  source 1..19: mol_type = other RNA
tggagttttcaacatgggg

SEQ ID NO: 3416 - RNA, 19 nt, synthetic construct
  source 1..19: mol_type = other RNA
atggagttttcaacatggg

SEQ ID NO: 3417 - RNA, 19 nt, synthetic construct
  source 1..19: mol_type = other RNA
tatggagttttcaacatgg

SEQ ID NO: 3418 - RNA, 19 nt, synthetic construct
  source 1..19: mol_type = other RNA
ttatggagttttcaacatg

SEQ ID NO: 3419 - RNA, 19 nt, synthetic construct
  source 1..19: mol_type = other RNA
gttatggagttttcaacat

SEQ ID NO: 3420 - RNA, 19 nt, synthetic construct
  source 1..19: mol_type = other RNA
tgttatggagttttcaaca

SEQ ID NO: 3421 - RNA, 19 nt, synthetic construct
  source 1..19: mol_type = other RNA
ctgttatggagttttcaac

SEQ ID NO: 3422 - RNA, 19 nt, synthetic construct
  source 1..19: mol_type = other RNA
actgttatggagttttcaa

SEQ ID NO: 3423 - RNA, 19 nt, synthetic construct
  source 1..19: mol_type = other RNA
aactgttatggagttttca

SEQ ID NO: 3424 - RNA, 19 nt, synthetic construct
  source 1..19: mol_type = other RNA
aaactgttatggagttttc

SEQ ID NO: 3425 - RNA, 19 nt, synthetic construct
  source 1..19: mol_type = other RNA
aaaactgttatggagtttt

SEQ ID NO: 3426 - RNA, 19 nt, synthetic construct
  source 1..19: mol_type = other RNA
taaaactgttatggagttt

SEQ ID NO: 3427 - RNA, 19 nt, synthetic construct
  source 1..19: mol_type = other RNA
ataaaactgttatggagtt

SEQ ID NO: 3428 - RNA, 19 nt, synthetic construct
  source 1..19: mol_type = other RNA
cataaaactgttatggagt

SEQ ID NO: 3429 - RNA, 19 nt, synthetic construct
  source 1..19: mol_type = other RNA
gcataaaactgttatggag

SEQ ID NO: 3430 - RNA, 19 nt, synthetic construct
  source 1..19: mol_type = other RNA
agcataaaactgttatgga

SEQ ID NO: 3431 - RNA, 19 nt, synthetic construct
  source 1..19: mol_type = other RNA
cagcataaaactgttatgg

SEQ ID NO: 3432 - RNA, 19 nt, synthetic construct
  source 1..19: mol_type = other RNA
tcagcataaaactgttatg

SEQ ID NO: 3433 - RNA, 19 nt, synthetic construct
  source 1..19: mol_type = other RNA
atcagcataaaactgttat

SEQ ID NO: 3434 - RNA, 19 nt, synthetic construct
  source 1..19: mol_type = other RNA
catcagcataaaactgtta

SEQ ID NO: 3435 - RNA, 19 nt, synthetic construct
  source 1..19: mol_type = other RNA
tcatcagcataaaactgtt

SEQ ID NO: 3436 - RNA, 19 nt, synthetic construct
  source 1..19: mol_type = other RNA
atcatcagcataaaactgt

SEQ ID NO: 3437 - RNA, 19 nt, synthetic construct
  source 1..19: mol_type = other RNA
tatcatcagcataaaactg

SEQ ID NO: 3438 - RNA, 19 nt, synthetic construct
  source 1..19: mol_type = other RNA
ttatcatcagcataaaact

SEQ ID NO: 3439 - RNA, 19 nt, synthetic construct
  source 1..19: mol_type = other RNA
attatcatcagcataaaac

SEQ ID NO: 3440 - RNA, 19 nt, synthetic construct
  source 1..19: mol_type = other RNA
aattatcatcagcataaaa

SEQ ID NO: 3441 - RNA, 19 nt, synthetic construct
  source 1..19: mol_type = other RNA
aaattatcatcagcataaa

SEQ ID NO: 3442 - RNA, 19 nt, synthetic construct
  source 1..19: mol_type = other RNA
taaattatcatcagcataa

SEQ ID NO: 3443 - RNA, 19 nt, synthetic construct
  source 1..19: mol_type = other RNA
ataaattatcatcagcata

SEQ ID NO: 3444 - RNA, 19 nt, synthetic construct
  source 1..19: mol_type = other RNA
gataaattatcatcagcat

SEQ ID NO: 3445 - RNA, 19 nt, synthetic construct
  source 1..19: mol_type = other RNA
agataaattatcatcagca

SEQ ID NO: 3446 - RNA, 19 nt, synthetic construct
  source 1..19: mol_type = other RNA
tagataaattatcatcagc

SEQ ID NO: 3447 - RNA, 19 nt, synthetic construct
  source 1..19: mol_type = other RNA
gtagataaattatcatcag

SEQ ID NO: 3448 - RNA, 19 nt, synthetic construct
  source 1..19: mol_type = other RNA
tgtagataaattatcatca

SEQ ID NO: 3449 - RNA, 19 nt, synthetic construct
  source 1..19: mol_type = other RNA
atgtagataaattatcatc

SEQ ID NO: 3450 - RNA, 19 nt, synthetic construct
  source 1..19: mol_type = other RNA
catgtagataaattatcat

SEQ ID NO: 3451 - RNA, 19 nt, synthetic construct
  source 1..19: mol_type = other RNA
gcatgtagataaattatca

SEQ ID NO: 3452 - RNA, 19 nt, synthetic construct
  source 1..19: mol_type = other RNA
tgcatgtagataaattatc

SEQ ID NO: 3453 - RNA, 19 nt, synthetic construct
  source 1..19: mol_type = other RNA
atgcatgtagataaattat

SEQ ID NO: 3454 - RNA, 19 nt, synthetic construct
  source 1..19: mol_type = other RNA
aatgcatgtagataaatta

SEQ ID NO: 3455 - RNA, 19 nt, synthetic construct
  source 1..19: mol_type = other RNA
aaatgcatgtagataaatt

SEQ ID NO: 3456 - RNA, 19 nt, synthetic construct
  source 1..19: mol_type = other RNA
gaaatgcatgtagataaat

SEQ ID NO: 3457 - RNA, 19 nt, synthetic construct
  source 1..19: mol_type = other RNA
tgaaatgcatgtagataaa

SEQ ID NO: 3458 - RNA, 19 nt, synthetic construct
  source 1..19: mol_type = other RNA
ttgaaatgcatgtagataa

SEQ ID NO: 3459 - RNA, 19 nt, synthetic construct
  source 1..19: mol_type = other RNA
attgaaatgcatgtagata

SEQ ID NO: 3460 - RNA, 19 nt, synthetic construct
  source 1..19: mol_type = other RNA
tattgaaatgcatgtagat

SEQ ID NO: 3461 - RNA, 19 nt, synthetic construct
  source 1..19: mol_type = other RNA
ttattgaaatgcatgtaga

SEQ ID NO: 3462 - RNA, 19 nt, synthetic construct
  source 1..19: mol_type = other RNA
tttattgaaatgcatgtag

SEQ ID NO: 3463 - RNA, 19 nt, synthetic construct
  source 1..19: mol_type = other RNA
gtttattgaaatgcatgta

SEQ ID NO: 3464 - RNA, 19 nt, synthetic construct
  source 1..19: mol_type = other RNA
ggtttattgaaatgcatgt

SEQ ID NO: 3465 - RNA, 19 nt, synthetic construct
  source 1..19: mol_type = other RNA
aggtttattgaaatgcatg

SEQ ID NO: 3466 - RNA, 19 nt, synthetic construct
  source 1..19: mol_type = other RNA
aaggtttattgaaatgcat

SEQ ID NO: 3467 - RNA, 19 nt, synthetic construct
  source 1..19: mol_type = other RNA
aaaggtttattgaaatgca

SEQ ID NO: 3468 - RNA, 19 nt, synthetic construct
  source 1..19: mol_type = other RNA
aaaaggtttattgaaatgc

SEQ ID NO: 3469 - RNA, 19 nt, synthetic construct
  source 1..19: mol_type = other RNA
caaaaggtttattgaaatg

SEQ ID NO: 3470 - RNA, 19 nt, synthetic construct
  source 1..19: mol_type = other RNA
acaaaaggtttattgaaat

SEQ ID NO: 3471 - RNA, 19 nt, synthetic construct
  source 1..19: mol_type = other RNA
aacaaaaggtttattgaaa

SEQ ID NO: 3472 - RNA, 19 nt, synthetic construct
  source 1..19: mol_type = other RNA
aaacaaaaggtttattgaa

SEQ ID NO: 3473 - RNA, 19 nt, synthetic construct
  source 1..19: mol_type = other RNA
gaaacaaaaggtttattga

SEQ ID NO: 3474 - RNA, 19 nt, synthetic construct
  source 1..19: mol_type = other RNA
ggaaacaaaaggtttattg

SEQ ID NO: 3475 - RNA, 19 nt, synthetic construct
  source 1..19: mol_type = other RNA
aggaaacaaaaggtttatt

SEQ ID NO: 3476 - RNA, 19 nt, synthetic construct
  source 1..19: mol_type = other RNA
taggaaacaaaaggtttat

SEQ ID NO: 3477 - RNA, 19 nt, synthetic construct
  source 1..19: mol_type = other RNA
ttaggaaacaaaaggttta

SEQ ID NO: 3478 - RNA, 19 nt, synthetic construct
  source 1..19: mol_type = other RNA
cttaggaaacaaaaggttt

SEQ ID NO: 3479 - RNA, 19 nt, synthetic construct
  source 1..19: mol_type = other RNA
tcttaggaaacaaaaggtt

SEQ ID NO: 3480 - RNA, 19 nt, synthetic construct
  source 1..19: mol_type = other RNA
gtcttaggaaacaaaaggt

SEQ ID NO: 3481 - RNA, 19 nt, synthetic construct
  source 1..19: mol_type = other RNA
agtcttaggaaacaaaagg

SEQ ID NO: 3482 - RNA, 19 nt, synthetic construct
  source 1..19: mol_type = other RNA
tagtcttaggaaacaaaag

SEQ ID NO: 3483 - RNA, 19 nt, synthetic construct
  source 1..19: mol_type = other RNA
ctagtcttaggaaacaaaa

SEQ ID NO: 3484 - RNA, 19 nt, synthetic construct
  source 1..19: mol_type = other RNA
tctagtcttaggaaacaaa

SEQ ID NO: 3485 - RNA, 21 nt, synthetic construct
  source 1..21: mol_type = other RNA
  modified_base 19^20: mod_base = OTHER; note = phosphorothioate linkage
  modified_base 20^21: mod_base = OTHER; note = phosphorothioate linkage
  modified_base 6: mod_base = OTHER; note = 2-fluoro-modified nucleoside
  modified_base 9: mod_base = OTHER; note = 2-fluoro-modified nucleoside
  modified_base 11: mod_base = OTHER; note = 2-fluoro-modified nucleoside
  modified_base 1: mod_base = OTHER; note = 2-O-methyl modified nucleoside
  modified_base 2: mod_base = OTHER; note = 2-O-methyl modified nucleoside
  modified_base 3: mod_base = OTHER; note = 2-O-methyl modified nucleoside
  modified_base 4: mod_base = OTHER; note = 2-O-methyl modified nucleoside
  modified_base 5: mod_base = OTHER; note = 2-O-methyl modified nucleoside
  modified_base 7: mod_base = OTHER; note = 2-O-methyl modified nucleoside
  modified_base 8: mod_base = OTHER; note = 2-O-methyl modified nucleoside
  modified_base 10: mod_base = OTHER; note = 2-O-methyl modified nucleoside
  modified_base 12: mod_base = OTHER; note = 2-O-methyl modified nucleoside
  modified_base 13: mod_base = OTHER; note = 2-O-methyl modified nucleoside
  modified_base 14: mod_base = OTHER; note = 2-O-methyl modified nucleoside
  modified_base 15: mod_base = OTHER; note = 2-O-methyl modified nucleoside
  modified_base 16: mod_base = OTHER; note = 2-O-methyl modified nucleoside
  modified_base 17: mod_base = OTHER; note = 2-O-methyl modified nucleoside
  modified_base 18: mod_base = OTHER; note = 2-O-methyl modified nucleoside
  modified_base 19: mod_base = OTHER; note = 2-O-methyl modified nucleoside
  modified_base 20: mod_base = OTHER; note = 2-O-methyl modified nucleoside
  modified_base 21: mod_base = OTHER; note = 2-O-methyl modified nucleoside
cagacatcatgagttggtatt

SEQ ID NO: 3486 - RNA, 21 nt, synthetic construct
  source 1..21: mol_type = other RNA
  modified_base 19^20: mod_base = OTHER; note = phosphorothioate linkage
  modified_base 20^21: mod_base = OTHER; note = phosphorothioate linkage
  modified_base 7: mod_base = OTHER; note = 2-fluoro-modified nucleoside
  modified_base 9: mod_base = OTHER; note = 2-fluoro-modified nucleoside
  modified_base 1: mod_base = OTHER; note = 2-O-methyl modified nucleoside
  modified_base 2: mod_base = OTHER; note = 2-O-methyl modified nucleoside
  modified_base 3: mod_base = OTHER; note = 2-O-methyl modified nucleoside
  modified_base 4: mod_base = OTHER; note = 2-O-methyl modified nucleoside
  modified_base 5: mod_base = OTHER; note = 2-O-methyl modified nucleoside
  modified_base 6: mod_base = OTHER; note = 2-O-methyl modified nucleoside
  modified_base 8: mod_base = OTHER; note = 2-O-methyl modified nucleoside
  modified_base 10: mod_base = OTHER; note = 2-O-methyl modified nucleoside
  modified_base 11: mod_base = OTHER; note = 2-O-methyl modified nucleoside
  modified_base 12: mod_base = OTHER; note = 2-O-methyl modified nucleoside
  modified_base 13: mod_base = OTHER; note = 2-O-methyl modified nucleoside
  modified_base 14: mod_base = OTHER; note = 2-O-methyl modified nucleoside
  modified_base 15: mod_base = OTHER; note = 2-O-methyl modified nucleoside
  modified_base 16: mod_base = OTHER; note = 2-O-methyl modified nucleoside
  modified_base 17: mod_base = OTHER; note = 2-O-methyl modified nucleoside
  modified_base 18: mod_base = OTHER; note = 2-O-methyl modified nucleoside
  modified_base 19: mod_base = OTHER; note = 2-O-methyl modified nucleoside
  modified_base 20: mod_base = OTHER; note = 2-O-methyl modified nucleoside
  modified_base 21: mod_base = OTHER; note = 2-O-methyl modified nucleoside
ccggaatttaattctctaatt

SEQ ID NO: 3487 - RNA, 21 nt, synthetic construct
  source 1..21: mol_type = other RNA
  modified_base 19^20: mod_base = OTHER; note = phosphorothioate linkage
  modified_base 20^21: mod_base = OTHER; note = phosphorothioate linkage
  modified_base 6: mod_base = OTHER; note = 2-fluoro-modified nucleoside
  modified_base 7: mod_base = OTHER; note = 2-fluoro-modified nucleoside
  modified_base 8: mod_base = OTHER; note = 2-fluoro-modified nucleoside
  modified_base 9: mod_base = OTHER; note = 2-fluoro-modified nucleoside
  modified_base 10: mod_base = OTHER; note = 2-fluoro-modified nucleoside
  modified_base 1: mod_base = OTHER; note = 2-O-methyl modified nucleoside
  modified_base 2: mod_base = OTHER; note = 2-O-methyl modified nucleoside
  modified_base 3: mod_base = OTHER; note = 2-O-methyl modified nucleoside
  modified_base 4: mod_base = OTHER; note = 2-O-methyl modified nucleoside
  modified_base 5: mod_base = OTHER; note = 2-O-methyl modified nucleoside
  modified_base 11: mod_base = OTHER; note = 2-O-methyl modified nucleoside
  modified_base 12: mod_base = OTHER; note = 2-O-methyl modified nucleoside
  modified_base 13: mod_base = OTHER; note = 2-O-methyl modified nucleoside
  modified_base 14: mod_base = OTHER; note = 2-O-methyl modified nucleoside
  modified_base 15: mod_base = OTHER; note = 2-O-methyl modified nucleoside
  modified_base 16: mod_base = OTHER; note = 2-O-methyl modified nucleoside
  modified_base 17: mod_base = OTHER; note = 2-O-methyl modified nucleoside
  modified_base 18: mod_base = OTHER; note = 2-O-methyl modified nucleoside
  modified_base 19: mod_base = OTHER; note = 2-O-methyl modified nucleoside
  modified_base 20: mod_base = OTHER; note = 2-O-methyl modified nucleoside
  modified_base 21: mod_base = OTHER; note = 2-O-methyl modified nucleoside
ctctacttctatgctcttatt

SEQ ID NO: 3488 - RNA, 21 nt, synthetic construct
  source 1..21: mol_type = other RNA
  modified_base 19^20: mod_base = OTHER; note = phosphorothioate linkage
  modified_base 20^21: mod_base = OTHER; note = phosphorothioate linkage
  modified_base 6: mod_base = OTHER; note = 2-fluoro-modified nucleoside
  modified_base 7: mod_base = OTHER; note = 2-fluoro-modified nucleoside
  modified_base 8: mod_base = OTHER; note = 2-fluoro-modified nucleoside
  modified_base 9: mod_base = OTHER; note = 2-fluoro-modified nucleoside
  modified_base 1: mod_base = OTHER; note = 2-O-methyl modified nucleoside
  modified_base 2: mod_base = OTHER; note = 2-O-methyl modified nucleoside
  modified_base 3: mod_base = OTHER; note = 2-O-methyl modified nucleoside
  modified_base 4: mod_base = OTHER; note = 2-O-methyl modified nucleoside
  modified_base 5: mod_base = OTHER; note = 2-O-methyl modified nucleoside
  modified_base 10: mod_base = OTHER; note = 2-O-methyl modified nucleoside
  modified_base 11: mod_base = OTHER; note = 2-O-methyl modified nucleoside
  modified_base 12: mod_base = OTHER; note = 2-O-methyl modified nucleoside
  modified_base 13: mod_base = OTHER; note = 2-O-methyl modified nucleoside
  modified_base 14: mod_base = OTHER; note = 2-O-methyl modified nucleoside
  modified_base 15: mod_base = OTHER; note = 2-O-methyl modified nucleoside
  modified_base 16: mod_base = OTHER; note = 2-O-methyl modified nucleoside
  modified_base 17: mod_base = OTHER; note = 2-O-methyl modified nucleoside
  modified_base 18: mod_base = OTHER; note = 2-O-methyl modified nucleoside
  modified_base 19: mod_base = OTHER; note = 2-O-methyl modified nucleoside
  modified_base 20: mod_base = OTHER; note = 2-O-methyl modified nucleoside
  modified_base 21: mod_base = OTHER; note = 2-O-methyl modified nucleoside
ctgcatcttagatgaaagatt

SEQ ID NO: 3489 - RNA, 21 nt, synthetic construct
  source 1..21: mol_type = other RNA
  modified_base 19^20: mod_base = OTHER; note = phosphorothioate linkage
  modified_base 20^21: mod_base = OTHER; note = phosphorothioate linkage
  modified_base 9: mod_base = OTHER; note = 2-fluoro-modified nucleoside
  modified_base 10: mod_base = OTHER; note = 2-fluoro-modified nucleoside
  modified_base 1: mod_base = OTHER; note = 2-O-methyl modified nucleoside
  modified_base 2: mod_base = OTHER; note = 2-O-methyl modified nucleoside
  modified_base 3: mod_base = OTHER; note = 2-O-methyl modified nucleoside
  modified_base 4: mod_base = OTHER; note = 2-O-methyl modified nucleoside
  modified_base 5: mod_base = OTHER; note = 2-O-methyl modified nucleoside
  modified_base 6: mod_base = OTHER; note = 2-O-methyl modified nucleoside
  modified_base 7: mod_base = OTHER; note = 2-O-methyl modified nucleoside
  modified_base 8: mod_base = OTHER; note = 2-O-methyl modified nucleoside
  modified_base 11: mod_base = OTHER; note = 2-O-methyl modified nucleoside
  modified_base 13: mod_base = OTHER; note = 2-O-methyl modified nucleoside
  modified_base 12: mod_base = OTHER; note = 2-O-methyl modified nucleoside
  modified_base 14: mod_base = OTHER; note = 2-O-methyl modified nucleoside
  modified_base 15: mod_base = OTHER; note = 2-O-methyl modified nucleoside
  modified_base 16: mod_base = OTHER; note = 2-O-methyl modified nucleoside
  modified_base 17: mod_base = OTHER; note = 2-O-methyl modified nucleoside
  modified_base 18: mod_base = OTHER; note = 2-O-methyl modified nucleoside
  modified_base 19: mod_base = OTHER; note = 2-O-methyl modified nucleoside
  modified_base 20: mod_base = OTHER; note = 2-O-methyl modified nucleoside
  modified_base 21: mod_base = OTHER; note = 2-O-methyl modified nucleoside
tgcatcttagatgaaagaatt

SEQ ID NO: 3490 - RNA, 21 nt, synthetic construct
  source 1..21: mol_type = other RNA
  modified_base 8: mod_base = OTHER; note = 2-fluoro-modified nucleoside
  modified_base 9: mod_base = OTHER; note = 2-fluoro-modified nucleoside
  modified_base 19^20: mod_base = OTHER; note = phosphorothioate linkage
  modified_base 20^21: mod_base = OTHER; note = phosphorothioate linkage
  modified_base 1: mod_base = OTHER; note = 2-O-methyl modified nucleoside
  modified_base 2: mod_base = OTHER; note = 2-O-methyl modified nucleoside
  modified_base 3: mod_base = OTHER; note = 2-O-methyl modified nucleoside
  modified_base 4: mod_base = OTHER; note = 2-O-methyl modified nucleoside
  modified_base 5: mod_base = OTHER; note = 2-O-methyl modified nucleoside
  modified_base 6: mod_base = OTHER; note = 2-O-methyl modified nucleoside
  modified_base 7: mod_base = OTHER; note = 2-O-methyl modified nucleoside
  modified_base 10: mod_base = OTHER; note = 2-O-methyl modified nucleoside
  modified_base 11: mod_base = OTHER; note = 2-O-methyl modified nucleoside
  modified_base 12: mod_base = OTHER; note = 2-O-methyl modified nucleoside
  modified_base 13: mod_base = OTHER; note = 2-O-methyl modified nucleoside
  modified_base 14: mod_base = OTHER; note = 2-O-methyl modified nucleoside
  modified_base 15: mod_base = OTHER; note = 2-O-methyl modified nucleoside
  modified_base 16: mod_base = OTHER; note = 2-O-methyl modified nucleoside
  modified_base 17: mod_base = OTHER; note = 2-O-methyl modified nucleoside
  modified_base 18: mod_base = OTHER; note = 2-O-methyl modified nucleoside
  modified_base 19: mod_base = OTHER; note = 2-O-methyl modified nucleoside
  modified_base 20: mod_base = OTHER; note = 2-O-methyl modified nucleoside
  modified_base 21: mod_base = OTHER; note = 2-O-methyl modified nucleoside
gcatcttagatgaaagatatt

SEQ ID NO: 3491 - RNA, 21 nt, synthetic construct
  source 1..21: mol_type = other RNA
  modified_base 5: mod_base = OTHER; note = 2-fluoro-modified nucleoside
  modified_base 6: mod_base = OTHER; note = 2-fluoro-modified nucleoside
  modified_base 9: mod_base = OTHER; note = 2-fluoro-modified nucleoside
  modified_base 11: mod_base = OTHER; note = 2-fluoro-modified nucleoside
  modified_base 19^20: mod_base = OTHER; note = phosphorothioate linkage
  modified_base 20^21: mod_base = OTHER; note = phosphorothioate linkage
  modified_base 1: mod_base = OTHER; note = 2-O-methyl modified nucleoside
  modified_base 2: mod_base = OTHER; note = 2-O-methyl modified nucleoside
  modified_base 3: mod_base = OTHER; note = 2-O-methyl modified nucleoside
  modified_base 4: mod_base = OTHER; note = 2-O-methyl modified nucleoside
  modified_base 7: mod_base = OTHER; note = 2-O-methyl modified nucleoside
  modified_base 8: mod_base = OTHER; note = 2-O-methyl modified nucleoside
  modified_base 10: mod_base = OTHER; note = 2-O-methyl modified nucleoside
  modified_base 12: mod_base = OTHER; note = 2-O-methyl modified nucleoside
  modified_base 13: mod_base = OTHER; note = 2-O-methyl modified nucleoside
  modified_base 14: mod_base = OTHER; note = 2-O-methyl modified nucleoside
  modified_base 16: mod_base = OTHER; note = 2-O-methyl modified nucleoside
  modified_base 15: mod_base = OTHER; note = 2-O-methyl modified nucleoside
  modified_base 17: mod_base = OTHER; note = 2-O-methyl modified nucleoside
  modified_base 18: mod_base = OTHER; note = 2-O-methyl modified nucleoside
  modified_base 19: mod_base = OTHER; note = 2-O-methyl modified nucleoside
  modified_base 20: mod_base = OTHER; note = 2-O-methyl modified nucleoside
  modified_base 21: mod_base = OTHER; note = 2-O-methyl modified nucleoside
tcttagatgaaagattcgatt

SEQ ID NO: 3492 - RNA, 21 nt, synthetic construct
  source 1..21: mol_type = other RNA
  modified_base 19^20: mod_base = OTHER; note = phosphorothioate linkage
  modified_base 20^21: mod_base = OTHER; note = phosphorothioate linkage
  modified_base 5: mod_base = OTHER; note = 2-fluoro-modified nucleoside
  modified_base 7: mod_base = OTHER; note = 2-fluoro-modified nucleoside
  modified_base 8: mod_base = OTHER; note = 2-fluoro-modified nucleoside
  modified_base 9: mod_base = OTHER; note = 2-fluoro-modified nucleoside
  modified_base 10: mod_base = OTHER; note = 2-fluoro-modified nucleoside
  modified_base 1: mod_base = OTHER; note = 2-O-methyl modified nucleoside
  modified_base 2: mod_base = OTHER; note = 2-O-methyl modified nucleoside
  modified_base 3: mod_base = OTHER; note = 2-O-methyl modified nucleoside
  modified_base 4: mod_base = OTHER; note = 2-O-methyl modified nucleoside
  modified_base 6: mod_base = OTHER; note = 2-O-methyl modified nucleoside
  modified_base 11: mod_base = OTHER; note = 2-O-methyl modified nucleoside
  modified_base 12: mod_base = OTHER; note = 2-O-methyl modified nucleoside
  modified_base 13: mod_base = OTHER; note = 2-O-methyl modified nucleoside
  modified_base 14: mod_base = OTHER; note = 2-O-methyl modified nucleoside
  modified_base 15: mod_base = OTHER; note = 2-O-methyl modified nucleoside
  modified_base 16: mod_base = OTHER; note = 2-O-methyl modified nucleoside
  modified_base 17: mod_base = OTHER; note = 2-O-methyl modified nucleoside
  modified_base 18: mod_base = OTHER; note = 2-O-methyl modified nucleoside
  modified_base 19: mod_base = OTHER; note = 2-O-methyl modified nucleoside
  modified_base 20: mod_base = OTHER; note = 2-O-methyl modified nucleoside
  modified_base 21: mod_base = OTHER; note = 2-O-methyl modified nucleoside
ttagatgaaagattcggtatt

SEQ ID NO: 3493 - RNA, 21 nt, synthetic construct
  source 1..21: mol_type = other RNA
  modified_base 19^20: mod_base = OTHER; note = phosphorothioate linkage
  modified_base 20^21: mod_base = OTHER; note = phosphorothioate linkage
  modified_base 6: mod_base = OTHER; note = 2-fluoro-modified nucleoside
  modified_base 7: mod_base = OTHER; note = 2-fluoro-modified nucleoside
  modified_base 8: mod_base = OTHER; note = 2-fluoro-modified nucleoside
  modified_base 9: mod_base = OTHER; note = 2-fluoro-modified nucleoside
  modified_base 11: mod_base = OTHER; note = 2-fluoro-modified nucleoside
  modified_base 1: mod_base = OTHER; note = 2-O-methyl modified nucleoside
  modified_base 2: mod_base = OTHER; note = 2-O-methyl modified nucleoside
  modified_base 3: mod_base = OTHER; note = 2-O-methyl modified nucleoside
  modified_base 4: mod_base = OTHER; note = 2-O-methyl modified nucleoside
  modified_base 5: mod_base = OTHER; note = 2-O-methyl modified nucleoside
  modified_base 10: mod_base = OTHER; note = 2-O-methyl modified nucleoside
  modified_base 12: mod_base = OTHER; note = 2-O-methyl modified nucleoside
  modified_base 13: mod_base = OTHER; note = 2-O-methyl modified nucleoside
  modified_base 14: mod_base = OTHER; note = 2-O-methyl modified nucleoside
  modified_base 15: mod_base = OTHER; note = 2-O-methyl modified nucleoside
  modified_base 16: mod_base = OTHER; note = 2-O-methyl modified nucleoside
  modified_base 17: mod_base = OTHER; note = 2-O-methyl modified nucleoside
  modified_base 18: mod_base = OTHER; note = 2-O-methyl modified nucleoside
  modified_base 19: mod_base = OTHER; note = 2-O-methyl modified nucleoside
  modified_base 20: mod_base = OTHER; note = 2-O-methyl modified nucleoside
  modified_base 21: mod_base = OTHER; note = 2-O-methyl modified nucleoside
tagatgaaagattcggtaatt

SEQ ID NO: 3494 - RNA, 21 nt, synthetic construct
  source 1..21: mol_type = other RNA
  modified_base 5: mod_base = OTHER; note = 2-fluoro-modified nucleoside
  modified_base 6: mod_base = OTHER; note = 2-fluoro-modified nucleoside
  modified_base 7: mod_base = OTHER; note = 2-fluoro-modified nucleoside
  modified_base 8: mod_base = OTHER; note = 2-fluoro-modified nucleoside
  modified_base 9: mod_base = OTHER; note = 2-fluoro-modified nucleoside
  modified_base 19^20: mod_base = OTHER; note = phosphorothioate linkage
  modified_base 20^21: mod_base = OTHER; note = phosphorothioate linkage
  modified_base 1: mod_base = OTHER; note = 2-O-methyl modified nucleoside
  modified_base 2: mod_base = OTHER; note = 2-O-methyl modified nucleoside
  modified_base 3: mod_base = OTHER; note = 2-O-methyl modified nucleoside
  modified_base 4: mod_base = OTHER; note = 2-O-methyl modified nucleoside
  modified_base 11: mod_base = OTHER; note = 2-O-methyl modified nucleoside
  modified_base 10: mod_base = OTHER; note = 2-O-methyl modified nucleoside
  modified_base 12: mod_base = OTHER; note = 2-O-methyl modified nucleoside
  modified_base 13: mod_base = OTHER; note = 2-O-methyl modified nucleoside
  modified_base 14: mod_base = OTHER; note = 2-O-methyl modified nucleoside
  modified_base 15: mod_base = OTHER; note = 2-O-methyl modified nucleoside
  modified_base 16: mod_base = OTHER; note = 2-O-methyl modified nucleoside
  modified_base 17: mod_base = OTHER; note = 2-O-methyl modified nucleoside
  modified_base 18: mod_base = OTHER; note = 2-O-methyl modified nucleoside
  modified_base 19: mod_base = OTHER; note = 2-O-methyl modified nucleoside
  modified_base 20: mod_base = OTHER; note = 2-O-methyl modified nucleoside
  modified_base 21: mod_base = OTHER; note = 2-O-methyl modified nucleoside
agatgaaagattcggtagatt

SEQ ID NO: 3495 - RNA, 21 nt, synthetic construct
  source 1..21: mol_type = other RNA
  modified_base 19^20: mod_base = OTHER; note = phosphorothioate linkage
  modified_base 20^21: mod_base = OTHER; note = phosphorothioate linkage
  modified_base 5: mod_base = OTHER; note = 2-fluoro-modified nucleoside
  modified_base 6: mod_base = OTHER; note = 2-fluoro-modified nucleoside
  modified_base 7: mod_base = OTHER; note = 2-fluoro-modified nucleoside
  modified_base 8: mod_base = OTHER; note = 2-fluoro-modified nucleoside
  modified_base 9: mod_base = OTHER; note = 2-fluoro-modified nucleoside
  modified_base 1: mod_base = OTHER; note = 2-O-methyl modified nucleoside
  modified_base 2: mod_base = OTHER; note = 2-O-methyl modified nucleoside
  modified_base 3: mod_base = OTHER; note = 2-O-methyl modified nucleoside
  modified_base 4: mod_base = OTHER; note = 2-O-methyl modified nucleoside
  modified_base 10: mod_base = OTHER; note = 2-O-methyl modified nucleoside
  modified_base 11: mod_base = OTHER; note = 2-O-methyl modified nucleoside
  modified_base 12: mod_base = OTHER; note = 2-O-methyl modified nucleoside
  modified_base 13: mod_base = OTHER; note = 2-O-methyl modified nucleoside
  modified_base 14: mod_base = OTHER; note = 2-O-methyl modified nucleoside
  modified_base 15: mod_base = OTHER; note = 2-O-methyl modified nucleoside
  modified_base 16: mod_base = OTHER; note = 2-O-methyl modified nucleoside
  modified_base 17: mod_base = OTHER; note = 2-O-methyl modified nucleoside
  modified_base 18: mod_base = OTHER; note = 2-O-methyl modified nucleoside
  modified_base 19: mod_base = OTHER; note = 2-O-methyl modified nucleoside
  modified_base 20: mod_base = OTHER; note = 2-O-methyl modified nucleoside
  modified_base 21: mod_base = OTHER; note = 2-O-methyl modified nucleoside
gatgaaagattcggtagtatt

SEQ ID NO: 3496 - RNA, 21 nt, synthetic construct
  source 1..21: mol_type = other RNA
  modified_base 19^20: mod_base = OTHER; note = phosphorothioate linkage
  modified_base 20^21: mod_base = OTHER; note = phosphorothioate linkage
  modified_base 8: mod_base = OTHER; note = 2-fluoro-modified nucleoside
  modified_base 9: mod_base = OTHER; note = 2-fluoro-modified nucleoside
  modified_base 1: mod_base = OTHER; note = 2-O-methyl modified nucleoside
  modified_base 2: mod_base = OTHER; note = 2-O-methyl modified nucleoside
  modified_base 3: mod_base = OTHER; note = 2-O-methyl modified nucleoside
  modified_base 4: mod_base = OTHER; note = 2-O-methyl modified nucleoside
  modified_base 5: mod_base = OTHER; note = 2-O-methyl modified nucleoside
  modified_base 6: mod_base = OTHER; note = 2-O-methyl modified nucleoside
  modified_base 7: mod_base = OTHER; note = 2-O-methyl modified nucleoside
  modified_base 10: mod_base = OTHER; note = 2-O-methyl modified nucleoside
  modified_base 11: mod_base = OTHER; note = 2-O-methyl modified nucleoside
  modified_base 12: mod_base = OTHER; note = 2-O-methyl modified nucleoside
  modified_base 13: mod_base = OTHER; note = 2-O-methyl modified nucleoside
  modified_base 14: mod_base = OTHER; note = 2-O-methyl modified nucleoside
  modified_base 15: mod_base = OTHER; note = 2-O-methyl modified nucleoside
  modified_base 16: mod_base = OTHER; note = 2-O-methyl modified nucleoside
  modified_base 17: mod_base = OTHER; note = 2-O-methyl modified nucleoside
  modified_base 18: mod_base = OTHER; note = 2-O-methyl modified nucleoside
  modified_base 19: mod_base = OTHER; note = 2-O-methyl modified nucleoside
  modified_base 20: mod_base = OTHER; note = 2-O-methyl modified nucleoside
  modified_base 21: mod_base = OTHER; note = 2-O-methyl modified nucleoside
tgaaagattcggtagttaatt

SEQ ID NO: 3497 - RNA, 21 nt, synthetic construct
  source 1..21: mol_type = other RNA
  modified_base 19^20: mod_base = OTHER; note = phosphorothioate linkage
  modified_base 20^21: mod_base = OTHER; note = phosphorothioate linkage
  modified_base 7: mod_base = OTHER; note = 2-fluoro-modified nucleoside
  modified_base 9: mod_base = OTHER; note = 2-fluoro-modified nucleoside
  modified_base 1: mod_base = OTHER; note = 2-O-methyl modified nucleoside
  modified_base 2: mod_base = OTHER; note = 2-O-methyl modified nucleoside
  modified_base 3: mod_base = OTHER; note = 2-O-methyl modified nucleoside
  modified_base 4: mod_base = OTHER; note = 2-O-methyl modified nucleoside
  modified_base 5: mod_base = OTHER; note = 2-O-methyl modified nucleoside
  modified_base 6: mod_base = OTHER; note = 2-O-methyl modified nucleoside
  modified_base 8: mod_base = OTHER; note = 2-O-methyl modified nucleoside
  modified_base 10: mod_base = OTHER; note = 2-O-methyl modified nucleoside
  modified_base 11: mod_base = OTHER; note = 2-O-methyl modified nucleoside
  modified_base 12: mod_base = OTHER; note = 2-O-methyl modified nucleoside
  modified_base 13: mod_base = OTHER; note = 2-O-methyl modified nucleoside
  modified_base 14: mod_base = OTHER; note = 2-O-methyl modified nucleoside
  modified_base 15: mod_base = OTHER; note = 2-O-methyl modified nucleoside
  modified_base 16: mod_base = OTHER; note = 2-O-methyl modified nucleoside
  modified_base 17: mod_base = OTHER; note = 2-O-methyl modified nucleoside
  modified_base 18: mod_base = OTHER; note = 2-O-methyl modified nucleoside
  modified_base 19: mod_base = OTHER; note = 2-O-methyl modified nucleoside
  modified_base 20: mod_base = OTHER; note = 2-O-methyl modified nucleoside
  modified_base 21: mod_base = OTHER; note = 2-O-methyl modified nucleoside
gaaagattcggtagttatatt

SEQ ID NO: 3498 - RNA, 21 nt, synthetic construct
  source 1..21: mol_type = other RNA
  modified_base 6: mod_base = OTHER; note = 2-fluoro-modified nucleoside
  modified_base 7: mod_base = OTHER; note = 2-fluoro-modified nucleoside
  modified_base 9: mod_base = OTHER; note = 2-fluoro-modified nucleoside
  modified_base 10: mod_base = OTHER; note = 2-fluoro-modified nucleoside
  modified_base 19^20: mod_base = OTHER; note = phosphorothioate linkage
  modified_base 20^21: mod_base = OTHER; note = phosphorothioate linkage
  modified_base 1: mod_base = OTHER; note = 2-O-methyl modified nucleoside
  modified_base 2: mod_base = OTHER; note = 2-O-methyl modified nucleoside
  modified_base 3: mod_base = OTHER; note = 2-O-methyl modified nucleoside
  modified_base 4: mod_base = OTHER; note = 2-O-methyl modified nucleoside
  modified_base 5: mod_base = OTHER; note = 2-O-methyl modified nucleoside
  modified_base 8: mod_base = OTHER; note = 2-O-methyl modified nucleoside
  modified_base 11: mod_base = OTHER; note = 2-O-methyl modified nucleoside
  modified_base 12: mod_base = OTHER; note = 2-O-methyl modified nucleoside
  modified_base 13: mod_base = OTHER; note = 2-O-methyl modified nucleoside
  modified_base 14: mod_base = OTHER; note = 2-O-methyl modified nucleoside
  modified_base 15: mod_base = OTHER; note = 2-O-methyl modified nucleoside
  modified_base 16: mod_base = OTHER; note = 2-O-methyl modified nucleoside
  modified_base 17: mod_base = OTHER; note = 2-O-methyl modified nucleoside
  modified_base 18: mod_base = OTHER; note = 2-O-methyl modified nucleoside
  modified_base 19: mod_base = OTHER; note = 2-O-methyl modified nucleoside
  modified_base 20: mod_base = OTHER; note = 2-O-methyl modified nucleoside
  modified_base 21: mod_base = OTHER; note = 2-O-methyl modified nucleoside
gattcggtagttattgtcatt

SEQ ID NO: 3499 - RNA, 21 nt, synthetic construct
  source 1..21: mol_type = other RNA
  modified_base 5: mod_base = OTHER; note = 2-fluoro-modified nucleoside
  modified_base 6: mod_base = OTHER; note = 2-fluoro-modified nucleoside
  modified_base 9: mod_base = OTHER; note = 2-fluoro-modified nucleoside
  modified_base 19^20: mod_base = OTHER; note = phosphorothioate linkage
  modified_base 20^21: mod_base = OTHER; note = phosphorothioate linkage
  modified_base 1: mod_base = OTHER; note = 2-O-methyl modified nucleoside
  modified_base 2: mod_base = OTHER; note = 2-O-methyl modified nucleoside
  modified_base 3: mod_base = OTHER; note = 2-O-methyl modified nucleoside
  modified_base 4: mod_base = OTHER; note = 2-O-methyl modified nucleoside
  modified_base 7: mod_base = OTHER; note = 2-O-methyl modified nucleoside
  modified_base 8: mod_base = OTHER; note = 2-O-methyl modified nucleoside
  modified_base 10: mod_base = OTHER; note = 2-O-methyl modified nucleoside
  modified_base 11: mod_base = OTHER; note = 2-O-methyl modified nucleoside
  modified_base 12: mod_base = OTHER; note = 2-O-methyl modified nucleoside
  modified_base 13: mod_base = OTHER; note = 2-O-methyl modified nucleoside
  modified_base 14: mod_base = OTHER; note = 2-O-methyl modified nucleoside
  modified_base 15: mod_base = OTHER; note = 2-O-methyl modified nucleoside
  modified_base 16: mod_base = OTHER; note = 2-O-methyl modified nucleoside
  modified_base 17: mod_base = OTHER; note = 2-O-methyl modified nucleoside
  modified_base 18: mod_base = OTHER; note = 2-O-methyl modified nucleoside
  modified_base 19: mod_base = OTHER; note = 2-O-methyl modified nucleoside
  modified_base 20: mod_base = OTHER; note = 2-O-methyl modified nucleoside
  modified_base 21: mod_base = OTHER; note = 2-O-methyl modified nucleoside
cggtagttattgtccaacatt

SEQ ID NO: 3500 - RNA, 21 nt, synthetic construct
  source 1..21: mol_type = other RNA
  modified_base 5: mod_base = OTHER; note = 2-fluoro-modified nucleoside
  modified_base 6: mod_base = OTHER; note = 2-fluoro-modified nucleoside
  modified_base 8: mod_base = OTHER; note = 2-fluoro-modified nucleoside
  modified_base 9: mod_base = OTHER; note = 2-fluoro-modified nucleoside
  modified_base 11: mod_base = OTHER; note = 2-fluoro-modified nucleoside
  modified_base 1: mod_base = OTHER; note = 2-O-methyl modified nucleoside
  modified_base 2: mod_base = OTHER; note = 2-O-methyl modified nucleoside
  modified_base 3: mod_base = OTHER; note = 2-O-methyl modified nucleoside
  modified_base 4: mod_base = OTHER; note = 2-O-methyl modified nucleoside
  modified_base 7: mod_base = OTHER; note = 2-O-methyl modified nucleoside
  modified_base 10: mod_base = OTHER; note = 2-O-methyl modified nucleoside
  modified_base 12: mod_base = OTHER; note = 2-O-methyl modified nucleoside
  modified_base 13: mod_base = OTHER; note = 2-O-methyl modified nucleoside
  modified_base 14: mod_base = OTHER; note = 2-O-methyl modified nucleoside
  modified_base 15: mod_base = OTHER; note = 2-O-methyl modified nucleoside
  modified_base 16: mod_base = OTHER; note = 2-O-methyl modified nucleoside
  modified_base 17: mod_base = OTHER; note = 2-O-methyl modified nucleoside
  modified_base 18: mod_base = OTHER; note = 2-O-methyl modified nucleoside
  modified_base 19: mod_base = OTHER; note = 2-O-methyl modified nucleoside
  modified_base 20: mod_base = OTHER; note = 2-O-methyl modified nucleoside
  modified_base 21: mod_base = OTHER; note = 2-O-methyl modified nucleoside
  modified_base 19^20: mod_base = OTHER; note = phosphorothioate linkage
  modified_base 20^21: mod_base = OTHER; note = phosphorothioate linkage
gtagttattgtccaactaatt

SEQ ID NO: 3501 - RNA, 21 nt, synthetic construct
  source 1..21: mol_type = other RNA
  modified_base 19^20: mod_base = OTHER; note = phosphorothioate linkage
  modified_base 20^21: mod_base = OTHER; note = phosphorothioate linkage
  modified_base 6: mod_base = OTHER; note = 2-fluoro-modified nucleoside
  modified_base 7: mod_base = OTHER; note = 2-fluoro-modified nucleoside
  modified_base 9: mod_base = OTHER; note = 2-fluoro-modified nucleoside
  modified_base 11: mod_base = OTHER; note = 2-fluoro-modified nucleoside
  modified_base 1: mod_base = OTHER; note = 2-O-methyl modified nucleoside
  modified_base 2: mod_base = OTHER; note = 2-O-methyl modified nucleoside
  modified_base 3: mod_base = OTHER; note = 2-O-methyl modified nucleoside
  modified_base 4: mod_base = OTHER; note = 2-O-methyl modified nucleoside
  modified_base 5: mod_base = OTHER; note = 2-O-methyl modified nucleoside
  modified_base 8: mod_base = OTHER; note = 2-O-methyl modified nucleoside
  modified_base 10: mod_base = OTHER; note = 2-O-methyl modified nucleoside
  modified_base 12: mod_base = OTHER; note = 2-O-methyl modified nucleoside
  modified_base 13: mod_base = OTHER; note = 2-O-methyl modified nucleoside
  modified_base 14: mod_base = OTHER; note = 2-O-methyl modified nucleoside
  modified_base 15: mod_base = OTHER; note = 2-O-methyl modified nucleoside
  modified_base 16: mod_base = OTHER; note = 2-O-methyl modified nucleoside
  modified_base 17: mod_base = OTHER; note = 2-O-methyl modified nucleoside
  modified_base 18: mod_base = OTHER; note = 2-O-methyl modified nucleoside
  modified_base 19: mod_base = OTHER; note = 2-O-methyl modified nucleoside
  modified_base 20: mod_base = OTHER; note = 2-O-methyl modified nucleoside
  modified_base 21: mod_base = OTHER; note = 2-O-methyl modified nucleoside
agttattgtccaactaccatt

SEQ ID NO: 3502 - RNA, 21 nt, synthetic construct
  source 1..21: mol_type = other RNA
  modified_base 19^20: mod_base = OTHER; note = phosphorothioate linkage
  modified_base 20^21: mod_base = OTHER; note = phosphorothioate linkage
  modified_base 9: mod_base = OTHER; note = 2-fluoro-modified nucleoside
  modified_base 1: mod_base = OTHER; note = 2-O-methyl modified nucleoside
  modified_base 2: mod_base = OTHER; note = 2-O-methyl modified nucleoside
  modified_base 3: mod_base = OTHER; note = 2-O-methyl modified nucleoside
  modified_base 4: mod_base = OTHER; note = 2-O-methyl modified nucleoside
  modified_base 5: mod_base = OTHER; note = 2-O-methyl modified nucleoside
  modified_base 6: mod_base = OTHER; note = 2-O-methyl modified nucleoside
  modified_base 7: mod_base = OTHER; note = 2-O-methyl modified nucleoside
  modified_base 8: mod_base = OTHER; note = 2-O-methyl modified nucleoside
  modified_base 10: mod_base = OTHER; note = 2-O-methyl modified nucleoside
  modified_base 11: mod_base = OTHER; note = 2-O-methyl modified nucleoside
  modified_base 12: mod_base = OTHER; note = 2-O-methyl modified nucleoside
  modified_base 13: mod_base = OTHER; note = 2-O-methyl modified nucleoside
  modified_base 14: mod_base = OTHER; note = 2-O-methyl modified nucleoside
  modified_base 15: mod_base = OTHER; note = 2-O-methyl modified nucleoside
  modified_base 16: mod_base = OTHER; note = 2-O-methyl modified nucleoside
  modified_base 17: mod_base = OTHER; note = 2-O-methyl modified nucleoside
  modified_base 18: mod_base = OTHER; note = 2-O-methyl modified nucleoside
  modified_base 19: mod_base = OTHER; note = 2-O-methyl modified nucleoside
  modified_base 20: mod_base = OTHER; note = 2-O-methyl modified nucleoside
  modified_base 21: mod_base = OTHER; note = 2-O-methyl modified nucleoside
gatttcctgtctacttatatt

SEQ ID NO: 3503 - RNA, 21 nt, synthetic construct
  source 1..21: mol_type = other RNA
  modified_base 19^20: mod_base = OTHER; note = phosphorothioate linkage
  modified_base 20^21: mod_base = OTHER; note = phosphorothioate linkage
  modified_base 5: mod_base = OTHER; note = 2-fluoro-modified nucleoside
  modified_base 6: mod_base = OTHER; note = 2-fluoro-modified nucleoside
  modified_base 9: mod_base = OTHER; note = 2-fluoro-modified nucleoside
  modified_base 11: mod_base = OTHER; note = 2-fluoro-modified nucleoside
atttcctgtctacttatcatt

SEQ ID NO: 3504 - RNA, 21 nt, synthetic construct
  source 1..21: mol_type = other RNA
  modified_base 19^20: mod_base = OTHER; note = phosphorothioate linkage
  modified_base 20^21: mod_base = OTHER; note = phosphorothioate linkage
  modified_base 5: mod_base = OTHER; note = 2-fluoro-modified nucleoside
  modified_base 6: mod_base = OTHER; note = 2-fluoro-modified nucleoside
  modified_base 8: mod_base = OTHER; note = 2-fluoro-modified nucleoside
  modified_base 9: mod_base = OTHER; note = 2-fluoro-modified nucleoside
  modified_base 11: mod_base = OTHER; note = 2-fluoro-modified nucleoside
agtagacaaggatctacaatt

SEQ ID NO: 3505 - RNA, 21 nt, synthetic construct
  source 1..21: mol_type = other RNA
  modified_base 19^20: mod_base = OTHER; note = phosphorothioate linkage
  modified_base 20^21: mod_base = OTHER; note = phosphorothioate linkage
  modified_base 7: mod_base = OTHER; note = 2-fluoro-modified nucleoside
  modified_base 9: mod_base = OTHER; note = 2-fluoro-modified nucleoside
  modified_base 10: mod_base = OTHER; note = 2-fluoro-modified nucleoside
ggatctacagtctttggaatt

SEQ ID NO: 3506 - RNA, 21 nt, synthetic construct
  source 1..21: mol_type = other RNA
  modified_base 19^20: mod_base = OTHER; note = phosphorothioate linkage
  modified_base 20^21: mod_base = OTHER; note = phosphorothioate linkage
  modified_base 6: mod_base = OTHER; note = 2-fluoro-modified nucleoside
  modified_base 9: mod_base = OTHER; note = 2-fluoro-modified nucleoside
  modified_base 11: mod_base = OTHER; note = 2-fluoro-modified nucleoside
atctacagtctttggaagatt

SEQ ID NO: 3507 - RNA, 21 nt, synthetic construct
  source 1..21: mol_type = other RNA
  modified_base 7: mod_base = OTHER; note = 2-fluoro-modified nucleoside
  modified_base 9: mod_base = OTHER; note = 2-fluoro-modified nucleoside
  modified_base 11: mod_base = OTHER; note = 2-fluoro-modified nucleoside
  modified_base 19^20: mod_base = OTHER; note = phosphorothioate linkage
  modified_base 20^21: mod_base = OTHER; note = phosphorothioate linkage
ggaagacatcttacatcaatt

SEQ ID NO: 3508 - RNA, 21 nt, synthetic construct
  source 1..21: mol_type = other RNA
  modified_base 19^20: mod_base = OTHER; note = phosphorothioate linkage
  modified_base 20^21: mod_base = OTHER; note = phosphorothioate linkage
  modified_base 5: mod_base = OTHER; note = 2-fluoro-modified nucleoside
  modified_base 7: mod_base = OTHER; note = 2-fluoro-modified nucleoside
  modified_base 8: mod_base = OTHER; note = 2-fluoro-modified nucleoside
  modified_base 9: mod_base = OTHER; note = 2-fluoro-modified nucleoside
  modified_base 10: mod_base = OTHER; note = 2-fluoro-modified nucleoside
aagacatcttacatcaagatt

SEQ ID NO: 3509 - RNA, 21 nt, synthetic construct
  source 1..21: mol_type = other RNA
  modified_base 6: mod_base = OTHER; note = 2-fluoro-modified nucleoside
  modified_base 7: mod_base = OTHER; note = 2-fluoro-modified nucleoside
  modified_base 9: mod_base = OTHER; note = 2-fluoro-modified nucleoside
  modified_base 11: mod_base = OTHER; note = 2-fluoro-modified nucleoside
  modified_base 19^20: mod_base = OTHER; note = phosphorothioate linkage
  modified_base 20^21: mod_base = OTHER; note = phosphorothioate linkage
cagctgataaaagcaatcatt

SEQ ID NO: 3510 - RNA, 21 nt, synthetic construct
  source 1..21: mol_type = other RNA
  modified_base 19^20: mod_base = OTHER; note = phosphorothioate linkage
  modified_base 20^21: mod_base = OTHER; note = phosphorothioate linkage
  modified_base 5: mod_base = OTHER; note = 2-fluoro-modified nucleoside
  modified_base 6: mod_base = OTHER; note = 2-fluoro-modified nucleoside
  modified_base 8: mod_base = OTHER; note = 2-fluoro-modified nucleoside
  modified_base 9: mod_base = OTHER; note = 2-fluoro-modified nucleoside
  modified_base 11: mod_base = OTHER; note = 2-fluoro-modified nucleoside
tgataaaagcaatccaacatt

SEQ ID NO: 3511 - RNA, 21 nt, synthetic construct
  source 1..21: mol_type = other RNA
  modified_base 19^20: mod_base = OTHER; note = phosphorothioate linkage
  modified_base 20^21: mod_base = OTHER; note = phosphorothioate linkage
  modified_base 5: mod_base = OTHER; note = 2-fluoro-modified nucleoside
  modified_base 6: mod_base = OTHER; note = 2-fluoro-modified nucleoside
  modified_base 9: mod_base = OTHER; note = 2-fluoro-modified nucleoside
aatcctgatgaatcatcaatt

SEQ ID NO: 3512 - RNA, 21 nt, synthetic construct
  source 1..21: mol_type = other RNA
  modified_base 19^20: mod_base = OTHER; note = phosphorothioate linkage
  modified_base 20^21: mod_base = OTHER; note = phosphorothioate linkage
  modified_base 8: mod_base = OTHER; note = 2-fluoro-modified nucleoside
  modified_base 9: mod_base = OTHER; note = 2-fluoro-modified nucleoside
  modified_base 11: mod_base = OTHER; note = 2-fluoro-modified nucleoside
tgatgaatcatcaaaaccatt

SEQ ID NO: 3513 - RNA, 21 nt, synthetic construct
  source 1..21: mol_type = other RNA
  modified_base 5: mod_base = OTHER; note = 2-fluoro-modified nucleoside
  modified_base 6: mod_base = OTHER; note = 2-fluoro-modified nucleoside
  modified_base 8: mod_base = OTHER; note = 2-fluoro-modified nucleoside
  modified_base 9: mod_base = OTHER; note = 2-fluoro-modified nucleoside
  modified_base 11: mod_base = OTHER; note = 2-fluoro-modified nucleoside
  modified_base 19^20: mod_base = OTHER; note = phosphorothioate linkage
  modified_base 20^21: mod_base = OTHER; note = phosphorothioate linkage
gtccaggaaaatgttagaatt

SEQ ID NO: 3514 - RNA, 21 nt, synthetic construct
  source 1..21: mol_type = other RNA
  modified_base 19^20: mod_base = OTHER; note = phosphorothioate linkage
  modified_base 20^21: mod_base = OTHER; note = phosphorothioate linkage
  modified_base 7: mod_base = OTHER; note = 2-fluoro-modified nucleoside
  modified_base 9: mod_base = OTHER; note = 2-fluoro-modified nucleoside
  modified_base 10: mod_base = OTHER; note = 2-fluoro-modified nucleoside
ccatgatatcactgggaaatt

SEQ ID NO: 3515 - RNA, 21 nt, synthetic construct
  source 1..21: mol_type = other RNA
  modified_base 5: mod_base = OTHER; note = 2-fluoro-modified nucleoside
  modified_base 6: mod_base = OTHER; note = 2-fluoro-modified nucleoside
  modified_base 8: mod_base = OTHER; note = 2-fluoro-modified nucleoside
  modified_base 9: mod_base = OTHER; note = 2-fluoro-modified nucleoside
  modified_base 19^20: mod_base = OTHER; note = phosphorothioate linkage
  modified_base 20^21: mod_base = OTHER; note = phosphorothioate linkage
aagattgtcaagacattgatt

SEQ ID NO: 3516 - RNA, 21 nt, synthetic construct
  source 1..21: mol_type = other RNA
  modified_base 19^20: mod_base = OTHER; note = phosphorothioate linkage
  modified_base 20^21: mod_base = OTHER; note = phosphorothioate linkage
  modified_base 5: mod_base = OTHER; note = 2-fluoro-modified nucleoside
  modified_base 9: mod_base = OTHER; note = 2-fluoro-modified nucleoside
  modified_base 11: mod_base = OTHER; note = 2-fluoro-modified nucleoside
agagcgggctttactttaatt

SEQ ID NO: 3517 - RNA, 21 nt, synthetic construct
  source 1..21: mol_type = other RNA
  modified_base 19^20: mod_base = OTHER; note = phosphorothioate linkage
  modified_base 20^21: mod_base = OTHER; note = phosphorothioate linkage
  modified_base 5: mod_base = OTHER; note = 2-fluoro-modified nucleoside
  modified_base 6: mod_base = OTHER; note = 2-fluoro-modified nucleoside
  modified_base 7: mod_base = OTHER; note = 2-fluoro-modified nucleoside
  modified_base 8: mod_base = OTHER; note = 2-fluoro-modified nucleoside
  modified_base 9: mod_base = OTHER; note = 2-fluoro-modified nucleoside
taaacctctgaaagctaaatt

SEQ ID NO: 3518 - RNA, 21 nt, synthetic construct
  source 1..21: mol_type = other RNA
  modified_base 19^20: mod_base = OTHER; note = phosphorothioate linkage
  modified_base 20^21: mod_base = OTHER; note = phosphorothioate linkage
  modified_base 5: mod_base = OTHER; note = 2-fluoro-modified nucleoside
  modified_base 6: mod_base = OTHER; note = 2-fluoro-modified nucleoside
  modified_base 7: mod_base = OTHER; note = 2-fluoro-modified nucleoside
  modified_base 8: mod_base = OTHER; note = 2-fluoro-modified nucleoside
  modified_base 9: mod_base = OTHER; note = 2-fluoro-modified nucleoside
tcaagaaaaactggattcatt

SEQ ID NO: 3519 - RNA, 21 nt, synthetic construct
  source 1..21: mol_type = other RNA
  modified_base 19^20: mod_base = OTHER; note = phosphorothioate linkage
  modified_base 20^21: mod_base = OTHER; note = phosphorothioate linkage
  modified_base 8: mod_base = OTHER; note = 2-fluoro-modified nucleoside
  modified_base 9: mod_base = OTHER; note = 2-fluoro-modified nucleoside
agaaaaactggattcaatatt

SEQ ID NO: 3520 - RNA, 21 nt, synthetic construct
  source 1..21: mol_type = other RNA
  modified_base 19^20: mod_base = OTHER; note = phosphorothioate linkage
  modified_base 20^21: mod_base = OTHER; note = phosphorothioate linkage
  modified_base 5: mod_base = OTHER; note = 2-fluoro-modified nucleoside
  modified_base 7: mod_base = OTHER; note = 2-fluoro-modified nucleoside
  modified_base 8: mod_base = OTHER; note = 2-fluoro-modified nucleoside
  modified_base 9: mod_base = OTHER; note = 2-fluoro-modified nucleoside
  modified_base 10: mod_base = OTHER; note = 2-fluoro-modified nucleoside
ggaaatgagaagattcatatt

SEQ ID NO: 3521 - RNA, 21 nt, synthetic construct
  source 1..21: mol_type = other RNA
  modified_base 19^20: mod_base = OTHER; note = phosphorothioate linkage
  modified_base 20^21: mod_base = OTHER; note = phosphorothioate linkage
  modified_base 5: mod_base = OTHER; note = 2-fluoro-modified nucleoside
  modified_base 9: mod_base = OTHER; note = 2-fluoro-modified nucleoside
gaagattcatttgataagatt

SEQ ID NO: 3522 - RNA, 21 nt, synthetic construct
  source 1..21: mol_type = other RNA
  modified_base 19^20: mod_base = OTHER; note = phosphorothioate linkage
  modified_base 20^21: mod_base = OTHER; note = phosphorothioate linkage
  modified_base 5: mod_base = OTHER; note = 2-fluoro-modified nucleoside
  modified_base 6: mod_base = OTHER; note = 2-fluoro-modified nucleoside
  modified_base 8: mod_base = OTHER; note = 2-fluoro-modified nucleoside
  modified_base 9: mod_base = OTHER; note = 2-fluoro-modified nucleoside
agattcatttgataagcaatt

SEQ ID NO: 3523 - RNA, 21 nt, synthetic construct
  source 1..21: mol_type = other RNA
  modified_base 19^20: mod_base = OTHER; note = phosphorothioate linkage
  modified_base 20^21: mod_base = OTHER; note = phosphorothioate linkage
  modified_base 5: mod_base = OTHER; note = 2-fluoro-modified nucleoside
  modified_base 6: mod_base = OTHER; note = 2-fluoro-modified nucleoside
  modified_base 8: mod_base = OTHER; note = 2-fluoro-modified nucleoside
  modified_base 9: mod_base = OTHER; note = 2-fluoro-modified nucleoside
  modified_base 11: mod_base = OTHER; note = 2-fluoro-modified nucleoside
cattaagagtggaactggatt

SEQ ID NO: 3524 - RNA, 21 nt, synthetic construct
  source 1..21: mol_type = other RNA
  modified_base 19^20: mod_base = OTHER; note = phosphorothioate linkage
  modified_base 20^21: mod_base = OTHER; note = phosphorothioate linkage
  modified_base 6: mod_base = OTHER; note = 2-fluoro-modified nucleoside
  modified_base 7: mod_base = OTHER; note = 2-fluoro-modified nucleoside
  modified_base 9: mod_base = OTHER; note = 2-fluoro-modified nucleoside
  modified_base 10: mod_base = OTHER; note = 2-fluoro-modified nucleoside
acaatgacaatgataagtatt

SEQ ID NO: 3525 - RNA, 21 nt, synthetic construct
  source 1..21: mol_type = other RNA
  modified_base 19^20: mod_base = OTHER; note = phosphorothioate linkage
  modified_base 20^21: mod_base = OTHER; note = phosphorothioate linkage
  modified_base 8: mod_base = OTHER; note = 2-fluoro-modified nucleoside
  modified_base 9: mod_base = OTHER; note = 2-fluoro-modified nucleoside
  modified_base 10: mod_base = OTHER; note = 2-fluoro-modified nucleoside
  modified_base 11: mod_base = OTHER; note = 2-fluoro-modified nucleoside
taagtttgaaggcaactgatt

SEQ ID NO: 3526 - RNA, 21 nt, synthetic construct
  source 1..21: mol_type = other RNA
  modified_base 19^20: mod_base = OTHER; note = phosphorothioate linkage
  modified_base 20^21: mod_base = OTHER; note = phosphorothioate linkage
  modified_base 5: mod_base = OTHER; note = 2-fluoro-modified nucleoside
  modified_base 7: mod_base = OTHER; note = 2-fluoro-modified nucleoside
  modified_base 8: mod_base = OTHER; note = 2-fluoro-modified nucleoside
  modified_base 9: mod_base = OTHER; note = 2-fluoro-modified nucleoside
  modified_base 10: mod_base = OTHER; note = 2-fluoro-modified nucleoside
ctcaatggagtttattacatt

SEQ ID NO: 3527 - RNA, 21 nt, synthetic construct
  source 1..21: mol_type = other RNA
  modified_base 19^20: mod_base = OTHER; note = phosphorothioate linkage
  modified_base 20^21: mod_base = OTHER; note = phosphorothioate linkage
  modified_base 6: mod_base = OTHER; note = 2-fluoro-modified nucleoside
  modified_base 7: mod_base = OTHER; note = 2-fluoro-modified nucleoside
  modified_base 8: mod_base = OTHER; note = 2-fluoro-modified nucleoside
  modified_base 9: mod_base = OTHER; note = 2-fluoro-modified nucleoside
tcaatggagtttattaccatt

SEQ ID NO: 3528 - RNA, 21 nt, synthetic construct
  source 1..21: mol_type = other RNA
  modified_base 19^20: mod_base = OTHER; note = phosphorothioate linkage
  modified_base 20^21: mod_base = OTHER; note = phosphorothioate linkage
  modified_base 6: mod_base = OTHER; note = 2-fluoro-modified nucleoside
  modified_base 9: mod_base = OTHER; note = 2-fluoro-modified nucleoside
agtttattaccaaggtggatt

SEQ ID NO: 3529 - RNA, 21 nt, synthetic construct
  source 1..21: mol_type = other RNA
  modified_base 19^20: mod_base = OTHER; note = phosphorothioate linkage
  modified_base 20^21: mod_base = OTHER; note = phosphorothioate linkage
  modified_base 5: mod_base = OTHER; note = 2-fluoro-modified nucleoside
  modified_base 7: mod_base = OTHER; note = 2-fluoro-modified nucleoside
  modified_base 9: mod_base = OTHER; note = 2-fluoro-modified nucleoside
  modified_base 11: mod_base = OTHER; note = 2-fluoro-modified nucleoside
aaagcatctactcctaatatt

SEQ ID NO: 3530 - RNA, 21 nt, synthetic construct
  source 1..21: mol_type = other RNA
  modified_base 19^20: mod_base = OTHER; note = phosphorothioate linkage
  modified_base 20^21: mod_base = OTHER; note = phosphorothioate linkage
  modified_base 5: mod_base = OTHER; note = 2-fluoro-modified nucleoside
  modified_base 9: mod_base = OTHER; note = 2-fluoro-modified nucleoside
aagcatctactcctaatgatt

SEQ ID NO: 3531 - RNA, 21 nt, synthetic construct
  source 1..21: mol_type = other RNA
  modified_base 19^20: mod_base = OTHER; note = phosphorothioate linkage
  modified_base 20^21: mod_base = OTHER; note = phosphorothioate linkage
  modified_base 6: mod_base = OTHER; note = 2-fluoro-modified nucleoside
  modified_base 8: mod_base = OTHER; note = 2-fluoro-modified nucleoside
  modified_base 7: mod_base = OTHER; note = 2-fluoro-modified nucleoside
  modified_base 9: mod_base = OTHER; note = 2-fluoro-modified nucleoside
  modified_base 10: mod_base = OTHER; note = 2-fluoro-modified nucleoside
atctactcctaatggttaatt

SEQ ID NO: 3532 - RNA, 21 nt, synthetic construct
  source 1..21: mol_type = other RNA
  modified_base 19^20: mod_base = OTHER; note = phosphorothioate linkage
  modified_base 20^21: mod_base = OTHER; note = phosphorothioate linkage
  modified_base 5: mod_base = OTHER; note = 2-fluoro-modified nucleoside
  modified_base 6: mod_base = OTHER; note = 2-fluoro-modified nucleoside
  modified_base 7: mod_base = OTHER; note = 2-fluoro-modified nucleoside
  modified_base 8: mod_base = OTHER; note = 2-fluoro-modified nucleoside
  modified_base 9: mod_base = OTHER; note = 2-fluoro-modified nucleoside
tctactcctaatggttatatt

SEQ ID NO: 3533 - RNA, 21 nt, synthetic construct
  source 1..21: mol_type = other RNA
  modified_base 19^20: mod_base = OTHER; note = phosphorothioate linkage
  modified_base 20^21: mod_base = OTHER; note = phosphorothioate linkage
  modified_base 9: mod_base = OTHER; note = 2-fluoro-modified nucleoside
  modified_base 10: mod_base = OTHER; note = 2-fluoro-modified nucleoside
ctactcctaatggttatgatt

SEQ ID NO: 3534 - RNA, 21 nt, synthetic construct
  source 1..21: mol_type = other RNA
  modified_base 19^20: mod_base = OTHER; note = phosphorothioate linkage
  modified_base 20^21: mod_base = OTHER; note = phosphorothioate linkage
  modified_base 6: mod_base = OTHER; note = 2-fluoro-modified nucleoside
  modified_base 7: mod_base = OTHER; note = 2-fluoro-modified nucleoside
  modified_base 9: mod_base = OTHER; note = 2-fluoro-modified nucleoside
  modified_base 10: mod_base = OTHER; note = 2-fluoro-modified nucleoside
ctcctaatggttatgataatt

SEQ ID NO: 3535 - RNA, 21 nt, synthetic construct
  source 1..21: mol_type = other RNA
  modified_base 19^20: mod_base = OTHER; note = phosphorothioate linkage
  modified_base 20^21: mod_base = OTHER; note = phosphorothioate linkage
  modified_base 6: mod_base = OTHER; note = 2-fluoro-modified nucleoside
  modified_base 9: mod_base = OTHER; note = 2-fluoro-modified nucleoside
  modified_base 10: mod_base = OTHER; note = 2-fluoro-modified nucleoside
cctaatggttatgataatatt

SEQ ID NO: 3536 - RNA, 21 nt, synthetic construct
  source 1..21: mol_type = other RNA
  modified_base 19^20: mod_base = OTHER; note = phosphorothioate linkage
  modified_base 20^21: mod_base = OTHER; note = phosphorothioate linkage
  modified_base 7: mod_base = OTHER; note = 2-fluoro-modified nucleoside
  modified_base 9: mod_base = OTHER; note = 2-fluoro-modified nucleoside
ttatttgggccacttggaatt

SEQ ID NO: 3537 - RNA, 21 nt, synthetic construct
  source 1..21: mol_type = other RNA
  modified_base 19^20: mod_base = OTHER; note = phosphorothioate linkage
  modified_base 20^21: mod_base = OTHER; note = phosphorothioate linkage
  modified_base 7: mod_base = OTHER; note = 2-fluoro-modified nucleoside
  modified_base 9: mod_base = OTHER; note = 2-fluoro-modified nucleoside
accactatgaagataatcatt

SEQ ID NO: 3538 - RNA, 21 nt, synthetic construct
  source 1..21: mol_type = other RNA
  modified_base 19^20: mod_base = OTHER; note = phosphorothioate linkage
  modified_base 20^21: mod_base = OTHER; note = phosphorothioate linkage
  modified_base 2: mod_base = OTHER; note = 2-fluoro-modified nucleoside
  modified_base 4: mod_base = OTHER; note = 2-fluoro-modified nucleoside
  modified_base 6: mod_base = OTHER; note = 2-fluoro-modified nucleoside
  modified_base 8: mod_base = OTHER; note = 2-fluoro-modified nucleoside
  modified_base 10: mod_base = OTHER; note = 2-fluoro-modified nucleoside
  modified_base 12: mod_base = OTHER; note = 2-fluoro-modified nucleoside
  modified_base 14: mod_base = OTHER; note = 2-fluoro-modified nucleoside
  modified_base 16: mod_base = OTHER; note = 2-fluoro-modified nucleoside
  modified_base 18: mod_base = OTHER; note = 2-fluoro-modified nucleoside
taccaactcatgatgtctgtt

SEQ ID NO: 3539 - RNA, 21 nt, synthetic construct
  source 1..21: mol_type = other RNA
  modified_base 19^20: mod_base = OTHER; note = phosphorothioate linkage
  modified_base 20^21: mod_base = OTHER; note = phosphorothioate linkage
  modified_base 2: mod_base = OTHER; note = 2-fluoro-modified nucleoside
  modified_base 4: mod_base = OTHER; note = 2-fluoro-modified nucleoside
  modified_base 6: mod_base = OTHER; note = 2-fluoro-modified nucleoside
  modified_base 8: mod_base = OTHER; note = 2-fluoro-modified nucleoside
  modified_base 10: mod_base = OTHER; note = 2-fluoro-modified nucleoside
  modified_base 12: mod_base = OTHER; note = 2-fluoro-modified nucleoside
  modified_base 14: mod_base = OTHER; note = 2-fluoro-modified nucleoside
  modified_base 16: mod_base = OTHER; note = 2-fluoro-modified nucleoside
  modified_base 18: mod_base = OTHER; note = 2-fluoro-modified nucleoside
ttagagaattaaattccggtt

SEQ ID NO: 3540 - RNA, 21 nt, synthetic construct
  source 1..21: mol_type = other RNA
  modified_base 19^20: mod_base = OTHER; note = phosphorothioate linkage
  modified_base 20^21: mod_base = OTHER; note = phosphorothioate linkage
  modified_base 2: mod_base = OTHER; note = 2-fluoro-modified nucleoside
  modified_base 4: mod_base = OTHER; note = 2-fluoro-modified nucleoside
  modified_base 6: mod_base = OTHER; note = 2-fluoro-modified nucleoside
  modified_base 8: mod_base = OTHER; note = 2-fluoro-modified nucleoside
  modified_base 10: mod_base = OTHER; note = 2-fluoro-modified nucleoside
  modified_base 12: mod_base = OTHER; note = 2-fluoro-modified nucleoside
  modified_base 14: mod_base = OTHER; note = 2-fluoro-modified nucleoside
  modified_base 16: mod_base = OTHER; note = 2-fluoro-modified nucleoside
  modified_base 18: mod_base = OTHER; note = 2-fluoro-modified nucleoside
taagagcatagaagtagagtt

SEQ ID NO: 3541 - RNA, 21 nt, synthetic construct
  source 1..21: mol_type = other RNA
  modified_base 19^20: mod_base = OTHER; note = phosphorothioate linkage
  modified_base 20^21: mod_base = OTHER; note = phosphorothioate linkage
  modified_base 2: mod_base = OTHER; note = 2-fluoro-modified nucleoside
  modified_base 4: mod_base = OTHER; note = 2-fluoro-modified nucleoside
  modified_base 6: mod_base = OTHER; note = 2-fluoro-modified nucleoside
  modified_base 8: mod_base = OTHER; note = 2-fluoro-modified nucleoside
  modified_base 10: mod_base = OTHER; note = 2-fluoro-modified nucleoside
  modified_base 12: mod_base = OTHER; note = 2-fluoro-modified nucleoside
  modified_base 14: mod_base = OTHER; note = 2-fluoro-modified nucleoside
  modified_base 16: mod_base = OTHER; note = 2-fluoro-modified nucleoside
  modified_base 18: mod_base = OTHER; note = 2-fluoro-modified nucleoside
tctttcatctaagatgcagtt

SEQ ID NO: 3542 - RNA, 21 nt, synthetic construct
  source 1..21: mol_type = other RNA
  modified_base 19^20: mod_base = OTHER; note = phosphorothioate linkage
  modified_base 20^21: mod_base = OTHER; note = phosphorothioate linkage
  modified_base 2: mod_base = OTHER; note = 2-fluoro-modified nucleoside
  modified_base 4: mod_base = OTHER; note = 2-fluoro-modified nucleoside
  modified_base 6: mod_base = OTHER; note = 2-fluoro-modified nucleoside
  modified_base 8: mod_base = OTHER; note = 2-fluoro-modified nucleoside
  modified_base 10: mod_base = OTHER; note = 2-fluoro-modified nucleoside
  modified_base 12: mod_base = OTHER; note = 2-fluoro-modified nucleoside
  modified_base 14: mod_base = OTHER; note = 2-fluoro-modified nucleoside
  modified_base 16: mod_base = OTHER; note = 2-fluoro-modified nucleoside
  modified_base 18: mod_base = OTHER; note = 2-fluoro-modified nucleoside
ttctttcatctaagatgcatt

SEQ ID NO: 3543 - RNA, 21 nt, synthetic construct
  source 1..21: mol_type = other RNA
  modified_base 19^20: mod_base = OTHER; note = phosphorothioate linkage
  modified_base 20^21: mod_base = OTHER; note = phosphorothioate linkage
  modified_base 2: mod_base = OTHER; note = 2-fluoro-modified nucleoside
  modified_base 4: mod_base = OTHER; note = 2-fluoro-modified nucleoside
  modified_base 6: mod_base = OTHER; note = 2-fluoro-modified nucleoside
  modified_base 8: mod_base = OTHER; note = 2-fluoro-modified nucleoside
  modified_base 10: mod_base = OTHER; note = 2-fluoro-modified nucleoside
  modified_base 12: mod_base = OTHER; note = 2-fluoro-modified nucleoside
  modified_base 14: mod_base = OTHER; note = 2-fluoro-modified nucleoside
  modified_base 16: mod_base = OTHER; note = 2-fluoro-modified nucleoside
  modified_base 18: mod_base = OTHER; note = 2-fluoro-modified nucleoside
tatctttcatctaagatgctt

SEQ ID NO: 3544 - RNA, 21 nt, synthetic construct
  source 1..21: mol_type = other RNA
  modified_base 2: mod_base = OTHER; note = 2-fluoro-modified nucleoside
  modified_base 4: mod_base = OTHER; note = 2-fluoro-modified nucleoside
  modified_base 6: mod_base = OTHER; note = 2-fluoro-modified nucleoside
  modified_base 8: mod_base = OTHER; note = 2-fluoro-modified nucleoside
  modified_base 10: mod_base = OTHER; note = 2-fluoro-modified nucleoside
  modified_base 12: mod_base = OTHER; note = 2-fluoro-modified nucleoside
  modified_base 14: mod_base = OTHER; note = 2-fluoro-modified nucleoside
  modified_base 16: mod_base = OTHER; note = 2-fluoro-modified nucleoside
  modified_base 18: mod_base = OTHER; note = 2-fluoro-modified nucleoside
  modified_base 1^2: mod_base = OTHER; note = phosphorothioate linkage
  modified_base 2^3: mod_base = OTHER; note = phosphorothioate linkage
  modified_base 19^20: mod_base = OTHER; note = phosphorothioate linkage
  modified_base 20^21: mod_base = OTHER; note = phosphorothioate linkage
tcgaatctttcatctaagatt

SEQ ID NO: 3545 - RNA, 21 nt, synthetic construct
  source 1..21: mol_type = other RNA
  modified_base 19^20: mod_base = OTHER; note = phosphorothioate linkage
  modified_base 20^21: mod_base = OTHER; note = phosphorothioate linkage
  modified_base 2: mod_base = OTHER; note = 2-fluoro-modified nucleoside
  modified_base 4: mod_base = OTHER; note = 2-fluoro-modified nucleoside
  modified_base 6: mod_base = OTHER; note = 2-fluoro-modified nucleoside
  modified_base 8: mod_base = OTHER; note = 2-fluoro-modified nucleoside
  modified_base 10: mod_base = OTHER; note = 2-fluoro-modified nucleoside
  modified_base 12: mod_base = OTHER; note = 2-fluoro-modified nucleoside
  modified_base 14: mod_base = OTHER; note = 2-fluoro-modified nucleoside
  modified_base 16: mod_base = OTHER; note = 2-fluoro-modified nucleoside
  modified_base 18: mod_base = OTHER; note = 2-fluoro-modified nucleoside
taccgaatctttcatctaatt

SEQ ID NO: 3546 - RNA, 21 nt, synthetic construct
  source 1..21: mol_type = other RNA
  modified_base 19^20: mod_base = OTHER; note = phosphorothioate linkage
  modified_base 20^21: mod_base = OTHER; note = phosphorothioate linkage
  modified_base 2: mod_base = OTHER; note = 2-fluoro-modified nucleoside
  modified_base 4: mod_base = OTHER; note = 2-fluoro-modified nucleoside
  modified_base 6: mod_base = OTHER; note = 2-fluoro-modified nucleoside
  modified_base 8: mod_base = OTHER; note = 2-fluoro-modified nucleoside
  modified_base 10: mod_base = OTHER; note = 2-fluoro-modified nucleoside
  modified_base 12: mod_base = OTHER; note = 2-fluoro-modified nucleoside
  modified_base 14: mod_base = OTHER; note = 2-fluoro-modified nucleoside
  modified_base 16: mod_base = OTHER; note = 2-fluoro-modified nucleoside
  modified_base 18: mod_base = OTHER; note = 2-fluoro-modified nucleoside
ttaccgaatctttcatctatt

SEQ ID NO: 3547 - RNA, 21 nt, synthetic construct
  source 1..21: mol_type = other RNA
  modified_base 19^20: mod_base = OTHER; note = phosphorothioate linkage
  modified_base 20^21: mod_base = OTHER; note = phosphorothioate linkage
  modified_base 2: mod_base = OTHER; note = 2-fluoro-modified nucleoside
  modified_base 4: mod_base = OTHER; note = 2-fluoro-modified nucleoside
  modified_base 6: mod_base = OTHER; note = 2-fluoro-modified nucleoside
  modified_base 8: mod_base = OTHER; note = 2-fluoro-modified nucleoside
  modified_base 10: mod_base = OTHER; note = 2-fluoro-modified nucleoside
  modified_base 12: mod_base = OTHER; note = 2-fluoro-modified nucleoside
  modified_base 14: mod_base = OTHER; note = 2-fluoro-modified nucleoside
  modified_base 16: mod_base = OTHER; note = 2-fluoro-modified nucleoside
  modified_base 18: mod_base = OTHER; note = 2-fluoro-modified nucleoside
tctaccgaatctttcatcttt

SEQ ID NO: 3548 - RNA, 21 nt, synthetic construct
  source 1..21: mol_type = other RNA
  modified_base 19^20: mod_base = OTHER; note = phosphorothioate linkage
  modified_base 20^21: mod_base = OTHER; note = phosphorothioate linkage
  modified_base 2: mod_base = OTHER; note = 2-fluoro-modified nucleoside
  modified_base 4: mod_base = OTHER; note = 2-fluoro-modified nucleoside
  modified_base 6: mod_base = OTHER; note = 2-fluoro-modified nucleoside
  modified_base 8: mod_base = OTHER; note = 2-fluoro-modified nucleoside
  modified_base 10: mod_base = OTHER; note = 2-fluoro-modified nucleoside
  modified_base 12: mod_base = OTHER; note = 2-fluoro-modified nucleoside
  modified_base 14: mod_base = OTHER; note = 2-fluoro-modified nucleoside
  modified_base 16: mod_base = OTHER; note = 2-fluoro-modified nucleoside
  modified_base 18: mod_base = OTHER; note = 2-fluoro-modified nucleoside
tactaccgaatctttcatctt

SEQ ID NO: 3549 - RNA, 21 nt, synthetic construct
  source 1..21: mol_type = other RNA
  modified_base 19^20: mod_base = OTHER; note = phosphorothioate linkage
  modified_base 20^21: mod_base = OTHER; note = phosphorothioate linkage
  modified_base 2: mod_base = OTHER; note = 2-fluoro-modified nucleoside
  modified_base 4: mod_base = OTHER; note = 2-fluoro-modified nucleoside
  modified_base 6: mod_base = OTHER; note = 2-fluoro-modified nucleoside
  modified_base 8: mod_base = OTHER; note = 2-fluoro-modified nucleoside
  modified_base 10: mod_base = OTHER; note = 2-fluoro-modified nucleoside
  modified_base 12: mod_base = OTHER; note = 2-fluoro-modified nucleoside
  modified_base 14: mod_base = OTHER; note = 2-fluoro-modified nucleoside
  modified_base 16: mod_base = OTHER; note = 2-fluoro-modified nucleoside
  modified_base 18: mod_base = OTHER; note = 2-fluoro-modified nucleoside
ttaactaccgaatctttcatt

SEQ ID NO: 3550 - RNA, 21 nt, synthetic construct
  source 1..21: mol_type = other RNA
  modified_base 19^20: mod_base = OTHER; note = phosphorothioate linkage
  modified_base 20^21: mod_base = OTHER; note = phosphorothioate linkage
  modified_base 2: mod_base = OTHER; note = 2-fluoro-modified nucleoside
  modified_base 4: mod_base = OTHER; note = 2-fluoro-modified nucleoside
  modified_base 6: mod_base = OTHER; note = 2-fluoro-modified nucleoside
  modified_base 8: mod_base = OTHER; note = 2-fluoro-modified nucleoside
  modified_base 10: mod_base = OTHER; note = 2-fluoro-modified nucleoside
  modified_base 12: mod_base = OTHER; note = 2-fluoro-modified nucleoside
  modified_base 14: mod_base = OTHER; note = 2-fluoro-modified nucleoside
  modified_base 16: mod_base = OTHER; note = 2-fluoro-modified nucleoside
  modified_base 18: mod_base = OTHER; note = 2-fluoro-modified nucleoside
tataactaccgaatctttctt

SEQ ID NO: 3551 - RNA, 21 nt, synthetic construct
  source 1..21: mol_type = other RNA
  modified_base 19^20: mod_base = OTHER; note = phosphorothioate linkage
  modified_base 20^21: mod_base = OTHER; note = phosphorothioate linkage
  modified_base 2: mod_base = OTHER; note = 2-fluoro-modified nucleoside
  modified_base 4: mod_base = OTHER; note = 2-fluoro-modified nucleoside
  modified_base 6: mod_base = OTHER; note = 2-fluoro-modified nucleoside
  modified_base 8: mod_base = OTHER; note = 2-fluoro-modified nucleoside
  modified_base 10: mod_base = OTHER; note = 2-fluoro-modified nucleoside
  modified_base 12: mod_base = OTHER; note = 2-fluoro-modified nucleoside
  modified_base 14: mod_base = OTHER; note = 2-fluoro-modified nucleoside
  modified_base 16: mod_base = OTHER; note = 2-fluoro-modified nucleoside
  modified_base 18: mod_base = OTHER; note = 2-fluoro-modified nucleoside
tgacaataactaccgaatctt

SEQ ID NO: 3552 - RNA, 21 nt, synthetic construct
  source 1..21: mol_type = other RNA
  modified_base 19^20: mod_base = OTHER; note = phosphorothioate linkage
  modified_base 20^21: mod_base = OTHER; note = phosphorothioate linkage
  modified_base 2: mod_base = OTHER; note = 2-fluoro-modified nucleoside
  modified_base 4: mod_base = OTHER; note = 2-fluoro-modified nucleoside
  modified_base 6: mod_base = OTHER; note = 2-fluoro-modified nucleoside
  modified_base 8: mod_base = OTHER; note = 2-fluoro-modified nucleoside
  modified_base 10: mod_base = OTHER; note = 2-fluoro-modified nucleoside
  modified_base 12: mod_base = OTHER; note = 2-fluoro-modified nucleoside
  modified_base 14: mod_base = OTHER; note = 2-fluoro-modified nucleoside
  modified_base 16: mod_base = OTHER; note = 2-fluoro-modified nucleoside
  modified_base 18: mod_base = OTHER; note = 2-fluoro-modified nucleoside
tgttggacaataactaccgtt

SEQ ID NO: 3553 - RNA, 21 nt, synthetic construct
  source 1..21: mol_type = other RNA
  modified_base 19^20: mod_base = OTHER; note = phosphorothioate linkage
  modified_base 20^21: mod_base = OTHER; note = phosphorothioate linkage
  modified_base 2: mod_base = OTHER; note = 2-fluoro-modified nucleoside
  modified_base 4: mod_base = OTHER; note = 2-fluoro-modified nucleoside
  modified_base 6: mod_base = OTHER; note = 2-fluoro-modified nucleoside
  modified_base 8: mod_base = OTHER; note = 2-fluoro-modified nucleoside
  modified_base 10: mod_base = OTHER; note = 2-fluoro-modified nucleoside
  modified_base 12: mod_base = OTHER; note = 2-fluoro-modified nucleoside
  modified_base 14: mod_base = OTHER; note = 2-fluoro-modified nucleoside
  modified_base 16: mod_base = OTHER; note = 2-fluoro-modified nucleoside
  modified_base 18: mod_base = OTHER; note = 2-fluoro-modified nucleoside
ttagttggacaataactactt

SEQ ID NO: 3554 - RNA, 21 nt, synthetic construct
  source 1..21: mol_type = other RNA
  modified_base 19^20: mod_base = OTHER; note = phosphorothioate linkage
  modified_base 20^21: mod_base = OTHER; note = phosphorothioate linkage
  modified_base 2: mod_base = OTHER; note = 2-fluoro-modified nucleoside
  modified_base 4: mod_base = OTHER; note = 2-fluoro-modified nucleoside
  modified_base 6: mod_base = OTHER; note = 2-fluoro-modified nucleoside
  modified_base 8: mod_base = OTHER; note = 2-fluoro-modified nucleoside
  modified_base 10: mod_base = OTHER; note = 2-fluoro-modified nucleoside
  modified_base 12: mod_base = OTHER; note = 2-fluoro-modified nucleoside
  modified_base 14: mod_base = OTHER; note = 2-fluoro-modified nucleoside
  modified_base 16: mod_base = OTHER; note = 2-fluoro-modified nucleoside
  modified_base 18: mod_base = OTHER; note = 2-fluoro-modified nucleoside
tggtagttggacaataacttt

SEQ ID NO: 3555 - RNA, 21 nt, synthetic construct
  source 1..21: mol_type = other RNA
  modified_base 19^20: mod_base = OTHER; note = phosphorothioate linkage
  modified_base 20^21: mod_base = OTHER; note = phosphorothioate linkage
  modified_base 2: mod_base = OTHER; note = 2-fluoro-modified nucleoside
  modified_base 4: mod_base = OTHER; note = 2-fluoro-modified nucleoside
  modified_base 6: mod_base = OTHER; note = 2-fluoro-modified nucleoside
  modified_base 8: mod_base = OTHER; note = 2-fluoro-modified nucleoside
  modified_base 10: mod_base = OTHER; note = 2-fluoro-modified nucleoside
  modified_base 12: mod_base = OTHER; note = 2-fluoro-modified nucleoside
  modified_base 14: mod_base = OTHER; note = 2-fluoro-modified nucleoside
  modified_base 16: mod_base = OTHER; note = 2-fluoro-modified nucleoside
  modified_base 18: mod_base = OTHER; note = 2-fluoro-modified nucleoside
tataagtagacaggaaatctt

SEQ ID NO: 3556 - RNA, 21 nt, synthetic construct
  source 1..21: mol_type = other RNA
  modified_base 19^20: mod_base = OTHER; note = phosphorothioate linkage
  modified_base 20^21: mod_base = OTHER; note = phosphorothioate linkage
  modified_base 2: mod_base = OTHER; note = 2-fluoro-modified nucleoside
  modified_base 4: mod_base = OTHER; note = 2-fluoro-modified nucleoside
  modified_base 6: mod_base = OTHER; note = 2-fluoro-modified nucleoside
  modified_base 8: mod_base = OTHER; note = 2-fluoro-modified nucleoside
  modified_base 10: mod_base = OTHER; note = 2-fluoro-modified nucleoside
  modified_base 12: mod_base = OTHER; note = 2-fluoro-modified nucleoside
  modified_base 14: mod_base = OTHER; note = 2-fluoro-modified nucleoside
  modified_base 16: mod_base = OTHER; note = 2-fluoro-modified nucleoside
  modified_base 18: mod_base = OTHER; note = 2-O-methyl modified nucleoside
  modified_base 18: mod_base = OTHER; note = 2-fluoro-modified nucleoside
tgataagtagacaggaaattt

SEQ ID NO: 3557 - RNA, 21 nt, synthetic construct
  source 1..21: mol_type = other RNA
  modified_base 19^20: mod_base = OTHER; note = phosphorothioate linkage
  modified_base 20^21: mod_base = OTHER; note = phosphorothioate linkage
  modified_base 2: mod_base = OTHER; note = 2-fluoro-modified nucleoside
  modified_base 4: mod_base = OTHER; note = 2-fluoro-modified nucleoside
  modified_base 6: mod_base = OTHER; note = 2-fluoro-modified nucleoside
  modified_base 8: mod_base = OTHER; note = 2-fluoro-modified nucleoside
  modified_base 10: mod_base = OTHER; note = 2-fluoro-modified nucleoside
  modified_base 12: mod_base = OTHER; note = 2-fluoro-modified nucleoside
  modified_base 14: mod_base = OTHER; note = 2-fluoro-modified nucleoside
  modified_base 16: mod_base = OTHER; note = 2-fluoro-modified nucleoside
  modified_base 18: mod_base = OTHER; note = 2-fluoro-modified nucleoside
ttgtagatccttgtctacttt

SEQ ID NO: 3558 - RNA, 21 nt, synthetic construct
  source 1..21: mol_type = other RNA
  modified_base 19^20: mod_base = OTHER; note = phosphorothioate linkage
  modified_base 20^21: mod_base = OTHER; note = phosphorothioate linkage
  modified_base 2: mod_base = OTHER; note = 2-fluoro-modified nucleoside
  modified_base 4: mod_base = OTHER; note = 2-fluoro-modified nucleoside
  modified_base 6: mod_base = OTHER; note = 2-fluoro-modified nucleoside
  modified_base 8: mod_base = OTHER; note = 2-fluoro-modified nucleoside
  modified_base 10: mod_base = OTHER; note = 2-fluoro-modified nucleoside
  modified_base 12: mod_base = OTHER; note = 2-fluoro-modified nucleoside
  modified_base 14: mod_base = OTHER; note = 2-fluoro-modified nucleoside
  modified_base 16: mod_base = OTHER; note = 2-fluoro-modified nucleoside
  modified_base 18: mod_base = OTHER; note = 2-fluoro-modified nucleoside
ttccaaagactgtagatcctt

SEQ ID NO: 3559 - RNA, 21 nt, synthetic construct
  source 1..21: mol_type = other RNA
  modified_base 19^20: mod_base = OTHER; note = phosphorothioate linkage
  modified_base 20^21: mod_base = OTHER; note = phosphorothioate linkage
  modified_base 2: mod_base = OTHER; note = 2-fluoro-modified nucleoside
  modified_base 4: mod_base = OTHER; note = 2-fluoro-modified nucleoside
  modified_base 6: mod_base = OTHER; note = 2-fluoro-modified nucleoside
  modified_base 8: mod_base = OTHER; note = 2-fluoro-modified nucleoside
  modified_base 10: mod_base = OTHER; note = 2-fluoro-modified nucleoside
  modified_base 12: mod_base = OTHER; note = 2-fluoro-modified nucleoside
  modified_base 14: mod_base = OTHER; note = 2-fluoro-modified nucleoside
  modified_base 16: mod_base = OTHER; note = 2-fluoro-modified nucleoside
  modified_base 18: mod_base = OTHER; note = 2-fluoro-modified nucleoside
tcttccaaagactgtagattt

SEQ ID NO: 3560 - RNA, 21 nt, synthetic construct
  source 1..21: mol_type = other RNA
  modified_base 19^20: mod_base = OTHER; note = phosphorothioate linkage
  modified_base 20^21: mod_base = OTHER; note = phosphorothioate linkage
  modified_base 2: mod_base = OTHER; note = 2-fluoro-modified nucleoside
  modified_base 4: mod_base = OTHER; note = 2-fluoro-modified nucleoside
  modified_base 6: mod_base = OTHER; note = 2-fluoro-modified nucleoside
  modified_base 10: mod_base = OTHER; note = 2-fluoro-modified nucleoside
  modified_base 12: mod_base = OTHER; note = 2-fluoro-modified nucleoside
  modified_base 16: mod_base = OTHER; note = 2-fluoro-modified nucleoside
  modified_base 18: mod_base = OTHER; note = 2-fluoro-modified nucleoside
ttgatgtaagatgtcttcctt

SEQ ID NO: 3561 - RNA, 21 nt, synthetic construct
  source 1..21: mol_type = other RNA
  modified_base 19^20: mod_base = OTHER; note = phosphorothioate linkage
  modified_base 20^21: mod_base = OTHER; note = phosphorothioate linkage
  modified_base 2: mod_base = OTHER; note = 2-fluoro-modified nucleoside
  modified_base 4: mod_base = OTHER; note = 2-fluoro-modified nucleoside
  modified_base 6: mod_base = OTHER; note = 2-fluoro-modified nucleoside
  modified_base 8: mod_base = OTHER; note = 2-fluoro-modified nucleoside
  modified_base 10: mod_base = OTHER; note = 2-fluoro-modified nucleoside
  modified_base 12: mod_base = OTHER; note = 2-fluoro-modified nucleoside
  modified_base 14: mod_base = OTHER; note = 2-fluoro-modified nucleoside
  modified_base 16: mod_base = OTHER; note = 2-fluoro-modified nucleoside
  modified_base 18: mod_base = OTHER; note = 2-fluoro-modified nucleoside
tcttgatgtaagatgtctttt

SEQ ID NO: 3562 - RNA, 21 nt, synthetic construct
  source 1..21: mol_type = other RNA
  modified_base 19^20: mod_base = OTHER; note = phosphorothioate linkage
  modified_base 20^21: mod_base = OTHER; note = phosphorothioate linkage
  modified_base 2: mod_base = OTHER; note = 2-fluoro-modified nucleoside
  modified_base 4: mod_base = OTHER; note = 2-fluoro-modified nucleoside
  modified_base 6: mod_base = OTHER; note = 2-fluoro-modified nucleoside
  modified_base 8: mod_base = OTHER; note = 2-fluoro-modified nucleoside
  modified_base 10: mod_base = OTHER; note = 2-fluoro-modified nucleoside
  modified_base 12: mod_base = OTHER; note = 2-fluoro-modified nucleoside
  modified_base 14: mod_base = OTHER; note = 2-fluoro-modified nucleoside
  modified_base 16: mod_base = OTHER; note = 2-fluoro-modified nucleoside
  modified_base 18: mod_base = OTHER; note = 2-fluoro-modified nucleoside
tgattgcttttatcagctgtt

SEQ ID NO: 3563 - RNA, 21 nt, synthetic construct
  source 1..21: mol_type = other RNA
  modified_base 19^20: mod_base = OTHER; note = phosphorothioate linkage
  modified_base 20^21: mod_base = OTHER; note = phosphorothioate linkage
  modified_base 2: mod_base = OTHER; note = 2-fluoro-modified nucleoside
  modified_base 4: mod_base = OTHER; note = 2-fluoro-modified nucleoside
  modified_base 6: mod_base = OTHER; note = 2-fluoro-modified nucleoside
  modified_base 10: mod_base = OTHER; note = 2-fluoro-modified nucleoside
  modified_base 12: mod_base = OTHER; note = 2-fluoro-modified nucleoside
  modified_base 14: mod_base = OTHER; note = 2-fluoro-modified nucleoside
  modified_base 16: mod_base = OTHER; note = 2-fluoro-modified nucleoside
  modified_base 18: mod_base = OTHER; note = 2-fluoro-modified nucleoside
tgttggattgcttttatcatt

SEQ ID NO: 3564 - RNA, 21 nt, synthetic construct
  source 1..21: mol_type = other RNA
  modified_base 19^20: mod_base = OTHER; note = phosphorothioate linkage
  modified_base 20^21: mod_base = OTHER; note = phosphorothioate linkage
  modified_base 2: mod_base = OTHER; note = 2-fluoro-modified nucleoside
  modified_base 4: mod_base = OTHER; note = 2-fluoro-modified nucleoside
  modified_base 6: mod_base = OTHER; note = 2-fluoro-modified nucleoside
  modified_base 8: mod_base = OTHER; note = 2-fluoro-modified nucleoside
  modified_base 10: mod_base = OTHER; note = 2-fluoro-modified nucleoside
  modified_base 12: mod_base = OTHER; note = 2-fluoro-modified nucleoside
  modified_base 14: mod_base = OTHER; note = 2-fluoro-modified nucleoside
  modified_base 16: mod_base = OTHER; note = 2-fluoro-modified nucleoside
  modified_base 18: mod_base = OTHER; note = 2-fluoro-modified nucleoside
ttgatgattcatcaggatttt

SEQ ID NO: 3565 - RNA, 21 nt, synthetic construct
  source 1..21: mol_type = other RNA
  modified_base 19^20: mod_base = OTHER; note = phosphorothioate linkage
  modified_base 20^21: mod_base = OTHER; note = phosphorothioate linkage
  modified_base 2: mod_base = OTHER; note = 2-fluoro-modified nucleoside
  modified_base 4: mod_base = OTHER; note = 2-fluoro-modified nucleoside
  modified_base 6: mod_base = OTHER; note = 2-fluoro-modified nucleoside
  modified_base 8: mod_base = OTHER; note = 2-fluoro-modified nucleoside
  modified_base 10: mod_base = OTHER; note = 2-fluoro-modified nucleoside
  modified_base 12: mod_base = OTHER; note = 2-fluoro-modified nucleoside
  modified_base 14: mod_base = OTHER; note = 2-fluoro-modified nucleoside
  modified_base 16: mod_base = OTHER; note = 2-fluoro-modified nucleoside
  modified_base 18: mod_base = OTHER; note = 2-fluoro-modified nucleoside
tggttttgatgattcatcatt

SEQ ID NO: 3566 - RNA, 21 nt, synthetic construct
  source 1..21: mol_type = other RNA
  modified_base 19^20: mod_base = OTHER; note = phosphorothioate linkage
  modified_base 20^21: mod_base = OTHER; note = phosphorothioate linkage
  modified_base 2: mod_base = OTHER; note = 2-fluoro-modified nucleoside
  modified_base 4: mod_base = OTHER; note = 2-fluoro-modified nucleoside
  modified_base 6: mod_base = OTHER; note = 2-fluoro-modified nucleoside
  modified_base 8: mod_base = OTHER; note = 2-fluoro-modified nucleoside
  modified_base 10: mod_base = OTHER; note = 2-fluoro-modified nucleoside
  modified_base 12: mod_base = OTHER; note = 2-fluoro-modified nucleoside
  modified_base 14: mod_base = OTHER; note = 2-fluoro-modified nucleoside
  modified_base 16: mod_base = OTHER; note = 2-fluoro-modified nucleoside
  modified_base 18: mod_base = OTHER; note = 2-fluoro-modified nucleoside
ttctaacattttcctggactt

SEQ ID NO: 3567 - RNA, 21 nt, synthetic construct
  source 1..21: mol_type = other RNA
  modified_base 19^20: mod_base = OTHER; note = phosphorothioate linkage
  modified_base 20^21: mod_base = OTHER; note = phosphorothioate linkage
  modified_base 2: mod_base = OTHER; note = 2-fluoro-modified nucleoside
  modified_base 4: mod_base = OTHER; note = 2-fluoro-modified nucleoside
  modified_base 6: mod_base = OTHER; note = 2-fluoro-modified nucleoside
  modified_base 10: mod_base = OTHER; note = 2-fluoro-modified nucleoside
  modified_base 12: mod_base = OTHER; note = 2-fluoro-modified nucleoside
  modified_base 14: mod_base = OTHER; note = 2-fluoro-modified nucleoside
  modified_base 16: mod_base = OTHER; note = 2-fluoro-modified nucleoside
  modified_base 18: mod_base = OTHER; note = 2-fluoro-modified nucleoside
tttcccagtgatatcatggtt

SEQ ID NO: 3568 - RNA, 21 nt, synthetic construct
  source 1..21: mol_type = other RNA
  modified_base 19^20: mod_base = OTHER; note = phosphorothioate linkage
  modified_base 20^21: mod_base = OTHER; note = phosphorothioate linkage
  modified_base 2: mod_base = OTHER; note = 2-fluoro-modified nucleoside
  modified_base 4: mod_base = OTHER; note = 2-fluoro-modified nucleoside
  modified_base 6: mod_base = OTHER; note = 2-fluoro-modified nucleoside
  modified_base 8: mod_base = OTHER; note = 2-fluoro-modified nucleoside
  modified_base 10: mod_base = OTHER; note = 2-fluoro-modified nucleoside
  modified_base 12: mod_base = OTHER; note = 2-fluoro-modified nucleoside
  modified_base 14: mod_base = OTHER; note = 2-fluoro-modified nucleoside
  modified_base 16: mod_base = OTHER; note = 2-fluoro-modified nucleoside
  modified_base 18: mod_base = OTHER; note = 2-fluoro-modified nucleoside
tcaatgtcttgacaatctttt

SEQ ID NO: 3569 - RNA, 21 nt, synthetic construct
  source 1..21: mol_type = other RNA
  modified_base 19^20: mod_base = OTHER; note = phosphorothioate linkage
  modified_base 20^21: mod_base = OTHER; note = phosphorothioate linkage
  modified_base 2: mod_base = OTHER; note = 2-fluoro-modified nucleoside
  modified_base 4: mod_base = OTHER; note = 2-fluoro-modified nucleoside
  modified_base 6: mod_base = OTHER; note = 2-fluoro-modified nucleoside
  modified_base 8: mod_base = OTHER; note = 2-fluoro-modified nucleoside
  modified_base 10: mod_base = OTHER; note = 2-fluoro-modified nucleoside
  modified_base 12: mod_base = OTHER; note = 2-fluoro-modified nucleoside
  modified_base 14: mod_base = OTHER; note = 2-fluoro-modified nucleoside
  modified_base 16: mod_base = OTHER; note = 2-fluoro-modified nucleoside
  modified_base 18: mod_base = OTHER; note = 2-fluoro-modified nucleoside
ttaaagtaaagcccgctcttt

SEQ ID NO: 3570 - RNA, 21 nt, synthetic construct
  source 1..21: mol_type = other RNA
  modified_base 19^20: mod_base = OTHER; note = phosphorothioate linkage
  modified_base 20^21: mod_base = OTHER; note = phosphorothioate linkage
  modified_base 2: mod_base = OTHER; note = 2-fluoro-modified nucleoside
  modified_base 4: mod_base = OTHER; note = 2-fluoro-modified nucleoside
  modified_base 6: mod_base = OTHER; note = 2-fluoro-modified nucleoside
  modified_base 8: mod_base = OTHER; note = 2-fluoro-modified nucleoside
  modified_base 10: mod_base = OTHER; note = 2-fluoro-modified nucleoside
  modified_base 12: mod_base = OTHER; note = 2-fluoro-modified nucleoside
  modified_base 14: mod_base = OTHER; note = 2-fluoro-modified nucleoside
  modified_base 16: mod_base = OTHER; note = 2-fluoro-modified nucleoside
  modified_base 18: mod_base = OTHER; note = 2-fluoro-modified nucleoside
tttagctttcagaggtttatt

SEQ ID NO: 3571 - RNA, 21 nt, synthetic construct
  source 1..21: mol_type = other RNA
  modified_base 19^20: mod_base = OTHER; note = phosphorothioate linkage
  modified_base 20^21: mod_base = OTHER; note = phosphorothioate linkage
  modified_base 2: mod_base = OTHER; note = 2-fluoro-modified nucleoside
  modified_base 4: mod_base = OTHER; note = 2-fluoro-modified nucleoside
  modified_base 6: mod_base = OTHER; note = 2-fluoro-modified nucleoside
  modified_base 8: mod_base = OTHER; note = 2-fluoro-modified nucleoside
  modified_base 10: mod_base = OTHER; note = 2-fluoro-modified nucleoside
  modified_base 12: mod_base = OTHER; note = 2-fluoro-modified nucleoside
  modified_base 14: mod_base = OTHER; note = 2-fluoro-modified nucleoside
  modified_base 16: mod_base = OTHER; note = 2-fluoro-modified nucleoside
  modified_base 18: mod_base = OTHER; note = 2-fluoro-modified nucleoside
tgaatccagtttttcttgatt

SEQ ID NO: 3572 - RNA, 21 nt, synthetic construct
  source 1..21: mol_type = other RNA
  modified_base 19^20: mod_base = OTHER; note = phosphorothioate linkage
  modified_base 20^21: mod_base = OTHER; note = phosphorothioate linkage
  modified_base 2: mod_base = OTHER; note = 2-fluoro-modified nucleoside
  modified_base 4: mod_base = OTHER; note = 2-fluoro-modified nucleoside
  modified_base 6: mod_base = OTHER; note = 2-fluoro-modified nucleoside
  modified_base 8: mod_base = OTHER; note = 2-fluoro-modified nucleoside
  modified_base 10: mod_base = OTHER; note = 2-fluoro-modified nucleoside
  modified_base 12: mod_base = OTHER; note = 2-fluoro-modified nucleoside
  modified_base 14: mod_base = OTHER; note = 2-fluoro-modified nucleoside
  modified_base 16: mod_base = OTHER; note = 2-fluoro-modified nucleoside
  modified_base 18: mod_base = OTHER; note = 2-fluoro-modified nucleoside
tattgaatccagtttttcttt

SEQ ID NO: 3573 - RNA, 21 nt, synthetic construct
  source 1..21: mol_type = other RNA
  modified_base 19^20: mod_base = OTHER; note = phosphorothioate linkage
  modified_base 20^21: mod_base = OTHER; note = phosphorothioate linkage
  modified_base 2: mod_base = OTHER; note = 2-fluoro-modified nucleoside
  modified_base 4: mod_base = OTHER; note = 2-fluoro-modified nucleoside
  modified_base 6: mod_base = OTHER; note = 2-fluoro-modified nucleoside
  modified_base 8: mod_base = OTHER; note = 2-fluoro-modified nucleoside
  modified_base 10: mod_base = OTHER; note = 2-fluoro-modified nucleoside
  modified_base 12: mod_base = OTHER; note = 2-fluoro-modified nucleoside
  modified_base 14: mod_base = OTHER; note = 2-fluoro-modified nucleoside
  modified_base 16: mod_base = OTHER; note = 2-fluoro-modified nucleoside
  modified_base 18: mod_base = OTHER; note = 2-fluoro-modified nucleoside
tatgaatcttctcatttcctt

SEQ ID NO: 3574 - RNA, 21 nt, synthetic construct
  source 1..21: mol_type = other RNA
  modified_base 19^20: mod_base = OTHER; note = phosphorothioate linkage
  modified_base 20^21: mod_base = OTHER; note = phosphorothioate linkage
  modified_base 2: mod_base = OTHER; note = 2-fluoro-modified nucleoside
  modified_base 4: mod_base = OTHER; note = 2-fluoro-modified nucleoside
  modified_base 6: mod_base = OTHER; note = 2-fluoro-modified nucleoside
  modified_base 8: mod_base = OTHER; note = 2-fluoro-modified nucleoside
  modified_base 10: mod_base = OTHER; note = 2-fluoro-modified nucleoside
  modified_base 12: mod_base = OTHER; note = 2-fluoro-modified nucleoside
  modified_base 14: mod_base = OTHER; note = 2-fluoro-modified nucleoside
  modified_base 16: mod_base = OTHER; note = 2-fluoro-modified nucleoside
  modified_base 18: mod_base = OTHER; note = 2-fluoro-modified nucleoside
tcttatcaaatgaatcttctt

SEQ ID NO: 3575 - RNA, 21 nt, synthetic construct
  source 1..21: mol_type = other RNA
  modified_base 19^20: mod_base = OTHER; note = phosphorothioate linkage
  modified_base 20^21: mod_base = OTHER; note = phosphorothioate linkage
  modified_base 2: mod_base = OTHER; note = 2-fluoro-modified nucleoside
  modified_base 4: mod_base = OTHER; note = 2-fluoro-modified nucleoside
  modified_base 6: mod_base = OTHER; note = 2-fluoro-modified nucleoside
  modified_base 8: mod_base = OTHER; note = 2-fluoro-modified nucleoside
  modified_base 10: mod_base = OTHER; note = 2-fluoro-modified nucleoside
  modified_base 12: mod_base = OTHER; note = 2-fluoro-modified nucleoside
  modified_base 14: mod_base = OTHER; note = 2-fluoro-modified nucleoside
  modified_base 16: mod_base = OTHER; note = 2-fluoro-modified nucleoside
  modified_base 18: mod_base = OTHER; note = 2-fluoro-modified nucleoside
ttgcttatcaaatgaatcttt

SEQ ID NO: 3576 - RNA, 21 nt, synthetic construct
  source 1..21: mol_type = other RNA
  modified_base 19^20: mod_base = OTHER; note = phosphorothioate linkage
  modified_base 20^21: mod_base = OTHER; note = phosphorothioate linkage
  modified_base 2: mod_base = OTHER; note = 2-fluoro-modified nucleoside
  modified_base 4: mod_base = OTHER; note = 2-fluoro-modified nucleoside
  modified_base 6: mod_base = OTHER; note = 2-fluoro-modified nucleoside
  modified_base 8: mod_base = OTHER; note = 2-fluoro-modified nucleoside
  modified_base 10: mod_base = OTHER; note = 2-fluoro-modified nucleoside
  modified_base 12: mod_base = OTHER; note = 2-fluoro-modified nucleoside
  modified_base 14: mod_base = OTHER; note = 2-fluoro-modified nucleoside
  modified_base 16: mod_base = OTHER; note = 2-fluoro-modified nucleoside
  modified_base 18: mod_base = OTHER; note = 2-fluoro-modified nucleoside
tccagttccactcttaatgtt

SEQ ID NO: 3577 - RNA, 21 nt, synthetic construct
  source 1..21: mol_type = other RNA
  modified_base 19^20: mod_base = OTHER; note = phosphorothioate linkage
  modified_base 20^21: mod_base = OTHER; note = phosphorothioate linkage
  modified_base 2: mod_base = OTHER; note = 2-fluoro-modified nucleoside
  modified_base 4: mod_base = OTHER; note = 2-fluoro-modified nucleoside
  modified_base 6: mod_base = OTHER; note = 2-fluoro-modified nucleoside
  modified_base 8: mod_base = OTHER; note = 2-fluoro-modified nucleoside
  modified_base 10: mod_base = OTHER; note = 2-fluoro-modified nucleoside
  modified_base 12: mod_base = OTHER; note = 2-fluoro-modified nucleoside
  modified_base 14: mod_base = OTHER; note = 2-fluoro-modified nucleoside
  modified_base 16: mod_base = OTHER; note = 2-fluoro-modified nucleoside
  modified_base 18: mod_base = OTHER; note = 2-fluoro-modified nucleoside
tacttatcattgtcattgttt

SEQ ID NO: 3578 - RNA, 21 nt, synthetic construct
  source 1..21: mol_type = other RNA
  modified_base 19^20: mod_base = OTHER; note = phosphorothioate linkage
  modified_base 20^21: mod_base = OTHER; note = phosphorothioate linkage
  modified_base 2: mod_base = OTHER; note = 2-fluoro-modified nucleoside
  modified_base 4: mod_base = OTHER; note = 2-fluoro-modified nucleoside
  modified_base 6: mod_base = OTHER; note = 2-fluoro-modified nucleoside
  modified_base 10: mod_base = OTHER; note = 2-fluoro-modified nucleoside
  modified_base 12: mod_base = OTHER; note = 2-fluoro-modified nucleoside
  modified_base 14: mod_base = OTHER; note = 2-fluoro-modified nucleoside
  modified_base 16: mod_base = OTHER; note = 2-fluoro-modified nucleoside
  modified_base 18: mod_base = OTHER; note = 2-fluoro-modified nucleoside
tcagttgccttcaaacttatt

SEQ ID NO: 3579 - RNA, 21 nt, synthetic construct
  source 1..21: mol_type = other RNA
  modified_base 19^20: mod_base = OTHER; note = phosphorothioate linkage
  modified_base 20^21: mod_base = OTHER; note = phosphorothioate linkage
  modified_base 2: mod_base = OTHER; note = 2-fluoro-modified nucleoside
  modified_base 4: mod_base = OTHER; note = 2-fluoro-modified nucleoside
  modified_base 6: mod_base = OTHER; note = 2-fluoro-modified nucleoside
  modified_base 8: mod_base = OTHER; note = 2-fluoro-modified nucleoside
  modified_base 10: mod_base = OTHER; note = 2-fluoro-modified nucleoside
  modified_base 12: mod_base = OTHER; note = 2-fluoro-modified nucleoside
  modified_base 14: mod_base = OTHER; note = 2-fluoro-modified nucleoside
  modified_base 16: mod_base = OTHER; note = 2-fluoro-modified nucleoside
  modified_base 18: mod_base = OTHER; note = 2-fluoro-modified nucleoside
tgtaataaactccattgagtt

SEQ ID NO: 3580 - RNA, 21 nt, synthetic construct
  source 1..21: mol_type = other RNA
  modified_base 19^20: mod_base = OTHER; note = phosphorothioate linkage
  modified_base 20^21: mod_base = OTHER; note = phosphorothioate linkage
  modified_base 2: mod_base = OTHER; note = 2-fluoro-modified nucleoside
  modified_base 4: mod_base = OTHER; note = 2-fluoro-modified nucleoside
  modified_base 6: mod_base = OTHER; note = 2-fluoro-modified nucleoside
  modified_base 8: mod_base = OTHER; note = 2-fluoro-modified nucleoside
  modified_base 10: mod_base = OTHER; note = 2-fluoro-modified nucleoside
  modified_base 12: mod_base = OTHER; note = 2-fluoro-modified nucleoside
  modified_base 14: mod_base = OTHER; note = 2-fluoro-modified nucleoside
  modified_base 16: mod_base = OTHER; note = 2-fluoro-modified nucleoside
  modified_base 18: mod_base = OTHER; note = 2-fluoro-modified nucleoside
tggtaataaactccattgatt

SEQ ID NO: 3581 - RNA, 21 nt, synthetic construct
  source 1..21: mol_type = other RNA
  modified_base 19^20: mod_base = OTHER; note = phosphorothioate linkage
  modified_base 20^21: mod_base = OTHER; note = phosphorothioate linkage
  modified_base 2: mod_base = OTHER; note = 2-fluoro-modified nucleoside
  modified_base 4: mod_base = OTHER; note = 2-fluoro-modified nucleoside
  modified_base 6: mod_base = OTHER; note = 2-fluoro-modified nucleoside
  modified_base 8: mod_base = OTHER; note = 2-fluoro-modified nucleoside
  modified_base 10: mod_base = OTHER; note = 2-fluoro-modified nucleoside
  modified_base 12: mod_base = OTHER; note = 2-fluoro-modified nucleoside
  modified_base 14: mod_base = OTHER; note = 2-fluoro-modified nucleoside
  modified_base 16: mod_base = OTHER; note = 2-fluoro-modified nucleoside
  modified_base 18: mod_base = OTHER; note = 2-fluoro-modified nucleoside
tccaccttggtaataaacttt

SEQ ID NO: 3582 - RNA, 21 nt, synthetic construct
  source 1..21: mol_type = other RNA
  modified_base 19^20: mod_base = OTHER; note = phosphorothioate linkage
  modified_base 20^21: mod_base = OTHER; note = phosphorothioate linkage
  modified_base 2: mod_base = OTHER; note = 2-fluoro-modified nucleoside
  modified_base 4: mod_base = OTHER; note = 2-fluoro-modified nucleoside
  modified_base 6: mod_base = OTHER; note = 2-fluoro-modified nucleoside
  modified_base 8: mod_base = OTHER; note = 2-fluoro-modified nucleoside
  modified_base 10: mod_base = OTHER; note = 2-fluoro-modified nucleoside
  modified_base 12: mod_base = OTHER; note = 2-fluoro-modified nucleoside
  modified_base 14: mod_base = OTHER; note = 2-fluoro-modified nucleoside
  modified_base 16: mod_base = OTHER; note = 2-fluoro-modified nucleoside
  modified_base 18: mod_base = OTHER; note = 2-fluoro-modified nucleoside
tattaggagtagatgcttttt

SEQ ID NO: 3583 - RNA, 21 nt, synthetic construct
  source 1..21: mol_type = other RNA
  modified_base 19^20: mod_base = OTHER; note = phosphorothioate linkage
  modified_base 20^21: mod_base = OTHER; note = phosphorothioate linkage
  modified_base 2: mod_base = OTHER; note = 2-fluoro-modified nucleoside
  modified_base 4: mod_base = OTHER; note = 2-fluoro-modified nucleoside
  modified_base 6: mod_base = OTHER; note = 2-fluoro-modified nucleoside
  modified_base 8: mod_base = OTHER; note = 2-fluoro-modified nucleoside
  modified_base 10: mod_base = OTHER; note = 2-fluoro-modified nucleoside
  modified_base 12: mod_base = OTHER; note = 2-fluoro-modified nucleoside
  modified_base 14: mod_base = OTHER; note = 2-fluoro-modified nucleoside
  modified_base 16: mod_base = OTHER; note = 2-fluoro-modified nucleoside
  modified_base 18: mod_base = OTHER; note = 2-fluoro-modified nucleoside
tcattaggagtagatgctttt

SEQ ID NO: 3584 - RNA, 21 nt, synthetic construct
  source 1..21: mol_type = other RNA
  modified_base 19^20: mod_base = OTHER; note = phosphorothioate linkage
  modified_base 20^21: mod_base = OTHER; note = phosphorothioate linkage
  modified_base 2: mod_base = OTHER; note = 2-fluoro-modified nucleoside
  modified_base 4: mod_base = OTHER; note = 2-fluoro-modified nucleoside
  modified_base 6: mod_base = OTHER; note = 2-fluoro-modified nucleoside
  modified_base 8: mod_base = OTHER; note = 2-fluoro-modified nucleoside
  modified_base 10: mod_base = OTHER; note = 2-fluoro-modified nucleoside
  modified_base 12: mod_base = OTHER; note = 2-fluoro-modified nucleoside
  modified_base 14: mod_base = OTHER; note = 2-fluoro-modified nucleoside
  modified_base 16: mod_base = OTHER; note = 2-fluoro-modified nucleoside
  modified_base 18: mod_base = OTHER; note = 2-fluoro-modified nucleoside
ttaaccattaggagtagattt

SEQ ID NO: 3585 - RNA, 21 nt, synthetic construct
  source 1..21: mol_type = other RNA
  modified_base 19^20: mod_base = OTHER; note = phosphorothioate linkage
  modified_base 20^21: mod_base = OTHER; note = phosphorothioate linkage
  modified_base 2: mod_base = OTHER; note = 2-fluoro-modified nucleoside
  modified_base 4: mod_base = OTHER; note = 2-fluoro-modified nucleoside
  modified_base 6: mod_base = OTHER; note = 2-fluoro-modified nucleoside
  modified_base 8: mod_base = OTHER; note = 2-fluoro-modified nucleoside
  modified_base 10: mod_base = OTHER; note = 2-fluoro-modified nucleoside
  modified_base 12: mod_base = OTHER; note = 2-fluoro-modified nucleoside
  modified_base 14: mod_base = OTHER; note = 2-fluoro-modified nucleoside
  modified_base 16: mod_base = OTHER; note = 2-fluoro-modified nucleoside
  modified_base 18: mod_base = OTHER; note = 2-fluoro-modified nucleoside
tataaccattaggagtagatt

SEQ ID NO: 3586 - RNA, 21 nt, synthetic construct
  source 1..21: mol_type = other RNA
  modified_base 19^20: mod_base = OTHER; note = phosphorothioate linkage
  modified_base 20^21: mod_base = OTHER; note = phosphorothioate linkage
  modified_base 2: mod_base = OTHER; note = 2-fluoro-modified nucleoside
  modified_base 4: mod_base = OTHER; note = 2-fluoro-modified nucleoside
  modified_base 6: mod_base = OTHER; note = 2-fluoro-modified nucleoside
  modified_base 8: mod_base = OTHER; note = 2-fluoro-modified nucleoside
  modified_base 10: mod_base = OTHER; note = 2-fluoro-modified nucleoside
  modified_base 12: mod_base = OTHER; note = 2-fluoro-modified nucleoside
  modified_base 14: mod_base = OTHER; note = 2-fluoro-modified nucleoside
  modified_base 16: mod_base = OTHER; note = 2-fluoro-modified nucleoside
  modified_base 18: mod_base = OTHER; note = 2-fluoro-modified nucleoside
tcataaccattaggagtagtt

SEQ ID NO: 3587 - RNA, 21 nt, synthetic construct
  source 1..21: mol_type = other RNA
  modified_base 19^20: mod_base = OTHER; note = phosphorothioate linkage
  modified_base 20^21: mod_base = OTHER; note = phosphorothioate linkage
  modified_base 2: mod_base = OTHER; note = 2-fluoro-modified nucleoside
  modified_base 4: mod_base = OTHER; note = 2-fluoro-modified nucleoside
  modified_base 6: mod_base = OTHER; note = 2-fluoro-modified nucleoside
  modified_base 8: mod_base = OTHER; note = 2-fluoro-modified nucleoside
  modified_base 10: mod_base = OTHER; note = 2-fluoro-modified nucleoside
  modified_base 12: mod_base = OTHER; note = 2-fluoro-modified nucleoside
  modified_base 14: mod_base = OTHER; note = 2-fluoro-modified nucleoside
  modified_base 16: mod_base = OTHER; note = 2-fluoro-modified nucleoside
  modified_base 18: mod_base = OTHER; note = 2-fluoro-modified nucleoside
ttatcataaccattaggagtt

SEQ ID NO: 3588 - RNA, 21 nt, synthetic construct
  source 1..21: mol_type = other RNA
  modified_base 19^20: mod_base = OTHER; note = phosphorothioate linkage
  modified_base 20^21: mod_base = OTHER; note = phosphorothioate linkage
  modified_base 2: mod_base = OTHER; note = 2-fluoro-modified nucleoside
  modified_base 4: mod_base = OTHER; note = 2-fluoro-modified nucleoside
  modified_base 6: mod_base = OTHER; note = 2-fluoro-modified nucleoside
  modified_base 8: mod_base = OTHER; note = 2-fluoro-modified nucleoside
  modified_base 10: mod_base = OTHER; note = 2-fluoro-modified nucleoside
  modified_base 12: mod_base = OTHER; note = 2-fluoro-modified nucleoside
  modified_base 14: mod_base = OTHER; note = 2-fluoro-modified nucleoside
  modified_base 16: mod_base = OTHER; note = 2-fluoro-modified nucleoside
  modified_base 18: mod_base = OTHER; note = 2-fluoro-modified nucleoside
tattatcataaccattaggtt

SEQ ID NO: 3589 - RNA, 21 nt, synthetic construct
  source 1..21: mol_type = other RNA
  modified_base 19^20: mod_base = OTHER; note = phosphorothioate linkage
  modified_base 20^21: mod_base = OTHER; note = phosphorothioate linkage
  modified_base 2: mod_base = OTHER; note = 2-fluoro-modified nucleoside
  modified_base 4: mod_base = OTHER; note = 2-fluoro-modified nucleoside
  modified_base 6: mod_base = OTHER; note = 2-fluoro-modified nucleoside
  modified_base 8: mod_base = OTHER; note = 2-fluoro-modified nucleoside
  modified_base 10: mod_base = OTHER; note = 2-fluoro-modified nucleoside
  modified_base 12: mod_base = OTHER; note = 2-fluoro-modified nucleoside
  modified_base 14: mod_base = OTHER; note = 2-fluoro-modified nucleoside
  modified_base 16: mod_base = OTHER; note = 2-fluoro-modified nucleoside
  modified_base 18: mod_base = OTHER; note = 2-fluoro-modified nucleoside
ttccaagtggcccaaataatt

SEQ ID NO: 3590 - RNA, 23 nt, synthetic construct
  source 1..23: mol_type = other RNA
  modified_base 19^20: mod_base = OTHER; note = phosphorothioate linkage
  modified_base 20^21: mod_base = OTHER; note = phosphorothioate linkage
  modified_base 2: mod_base = OTHER; note = 2-fluoro-modified nucleoside
  modified_base 4: mod_base = OTHER; note = 2-fluoro-modified nucleoside
  modified_base 6: mod_base = OTHER; note = 2-fluoro-modified nucleoside
  modified_base 8: mod_base = OTHER; note = 2-fluoro-modified nucleoside
  modified_base 10: mod_base = OTHER; note = 2-fluoro-modified nucleoside
  modified_base 12: mod_base = OTHER; note = 2-fluoro-modified nucleoside
  modified_base 14: mod_base = OTHER; note = 2-fluoro-modified nucleoside
  modified_base 16: mod_base = OTHER; note = 2-fluoro-modified nucleoside
  modified_base 18: mod_base = OTHER; note = 2-fluoro-modified nucleoside
tgattatcttcatagtggtstst

SEQ ID NO: 3591 - RNA, 21 nt, synthetic construct
  source 1..21: mol_type = other RNA
  modified_base 1: mod_base = OTHER; note = GalNAc#1
  modified_base 1^2: mod_base = OTHER; note = phosphorothioate linkage
  modified_base 2^3: mod_base = OTHER; note = phosphorothioate linkage
  modified_base 19^20: mod_base = OTHER; note = phosphorothioate linkage
  modified_base 20^21: mod_base = OTHER; note = phosphorothioate linkage
  modified_base 5: mod_base = OTHER; note = 2-fluoro-modified nucleoside
  modified_base 6: mod_base = OTHER; note = 2-fluoro-modified nucleoside
  modified_base 8: mod_base = OTHER; note = 2-fluoro-modified nucleoside
  modified_base 9: mod_base = OTHER; note = 2-fluoro-modified nucleoside
gatgaaagattcggtagtatt

SEQ ID NO: 3592 - RNA, 21 nt, synthetic construct
  source 1..21: mol_type = other RNA
  modified_base 1^2: mod_base = OTHER; note = phosphorothioate linkage
  modified_base 2^3: mod_base = OTHER; note = phosphorothioate linkage
  modified_base 19^20: mod_base = OTHER; note = phosphorothioate linkage
  modified_base 20^21: mod_base = OTHER; note = phosphorothioate linkage
  modified_base 1: mod_base = OTHER; note = GalNAc#1; note = 2-O-methyl modified nucleoside
  modified_base 7: mod_base = OTHER; note = 2-fluoro-modified nucleoside
  modified_base 9: mod_base = OTHER; note = 2-fluoro-modified nucleoside
  modified_base 10: mod_base = OTHER; note = 2-fluoro-modified nucleoside
ggaaatgagaagattcatatt

SEQ ID NO: 3593 - RNA, 21 nt, synthetic construct
  source 1..21: mol_type = other RNA
  modified_base 1: mod_base = OTHER; note = GalNAc#1
  modified_base 1^2: mod_base = OTHER; note = phosphorothioate linkage
  modified_base 2^3: mod_base = OTHER; note = phosphorothioate linkage
  modified_base 19^20: mod_base = OTHER; note = phosphorothioate linkage
  modified_base 20^21: mod_base = OTHER; note = phosphorothioate linkage
  modified_base 5: mod_base = OTHER; note = 2-fluoro-modified nucleoside
  modified_base 9: mod_base = OTHER; note = 2-fluoro-modified nucleoside
gaagattcatttgataagatt

SEQ ID NO: 3594 - RNA, 21 nt, synthetic construct
  source 1..21: mol_type = other RNA
  modified_base 1: mod_base = OTHER; note = 2-O-methyl modified nucleoside; note = GalNAc#1
  modified_base 1^2: mod_base = OTHER; note = phosphorothioate linkage
  modified_base 2^3: mod_base = OTHER; note = phosphorothioate linkage
  modified_base 19^20: mod_base = OTHER; note = phosphorothioate linkage
  modified_base 20^21: mod_base = OTHER; note = phosphorothioate linkage
  modified_base 8: mod_base = OTHER; note = 2-fluoro-modified nucleoside
  modified_base 9: mod_base = OTHER; note = 2-fluoro-modified nucleoside
  modified_base 10: mod_base = OTHER; note = 2-fluoro-modified nucleoside
  modified_base 11: mod_base = OTHER; note = 2-fluoro-modified nucleoside
taagtttgaaggcaactgatt

SEQ ID NO: 3595 - RNA, 21 nt, synthetic construct
  source 1..21: mol_type = other RNA
  modified_base 1^2: mod_base = OTHER; note = phosphorothioate linkage
  modified_base 2^3: mod_base = OTHER; note = phosphorothioate linkage
  modified_base 19^20: mod_base = OTHER; note = phosphorothioate linkage
  modified_base 20^21: mod_base = OTHER; note = phosphorothioate linkage
  modified_base 2: mod_base = OTHER; note = 2-fluoro-modified nucleoside
  modified_base 4: mod_base = OTHER; note = 2-fluoro-modified nucleoside
  modified_base 6: mod_base = OTHER; note = 2-fluoro-modified nucleoside
  modified_base 8: mod_base = OTHER; note = 2-fluoro-modified nucleoside
  modified_base 10: mod_base = OTHER; note = 2-fluoro-modified nucleoside
  modified_base 12: mod_base = OTHER; note = 2-fluoro-modified nucleoside
  modified_base 14: mod_base = OTHER; note = 2-fluoro-modified nucleoside
  modified_base 16: mod_base = OTHER; note = 2-fluoro-modified nucleoside
  modified_base 18: mod_base = OTHER; note = 2-fluoro-modified nucleoside
tactaccgaatctttcatctt

SEQ ID NO: 3596 - RNA, 21 nt, synthetic construct
  source 1..21: mol_type = other RNA
  modified_base 1^2: mod_base = OTHER; note = phosphorothioate linkage
  modified_base 2^3: mod_base = OTHER; note = phosphorothioate linkage
  modified_base 19^20: mod_base = OTHER; note = phosphorothioate linkage
  modified_base 20^21: mod_base = OTHER; note = phosphorothioate linkage
  modified_base 2: mod_base = OTHER; note = 2-fluoro-modified nucleoside
  modified_base 4: mod_base = OTHER; note = 2-fluoro-modified nucleoside
  modified_base 6: mod_base = OTHER; note = 2-fluoro-modified nucleoside
  modified_base 8: mod_base = OTHER; note = 2-fluoro-modified nucleoside
  modified_base 10: mod_base = OTHER; note = 2-fluoro-modified nucleoside
  modified_base 12: mod_base = OTHER; note = 2-fluoro-modified nucleoside
  modified_base 14: mod_base = OTHER; note = 2-fluoro-modified nucleoside
  modified_base 16: mod_base = OTHER; note = 2-fluoro-modified nucleoside
  modified_base 18: mod_base = OTHER; note = 2-fluoro-modified nucleoside
tatgaatcttctcatttcctt

SEQ ID NO: 3597 - RNA, 21 nt, synthetic construct
  source 1..21: mol_type = other RNA
  modified_base 1^2: mod_base = OTHER; note = phosphorothioate linkage
  modified_base 2^3: mod_base = OTHER; note = phosphorothioate linkage
  modified_base 19^20: mod_base = OTHER; note = phosphorothioate linkage
  modified_base 20^21: mod_base = OTHER; note = phosphorothioate linkage
  modified_base 2: mod_base = OTHER; note = 2-fluoro-modified nucleoside
  modified_base 4: mod_base = OTHER; note = 2-fluoro-modified nucleoside
  modified_base 6: mod_base = OTHER; note = 2-fluoro-modified nucleoside
  modified_base 8: mod_base = OTHER; note = 2-fluoro-modified nucleoside
  modified_base 10: mod_base = OTHER; note = 2-fluoro-modified nucleoside
  modified_base 12: mod_base = OTHER; note = 2-fluoro-modified nucleoside
  modified_base 14: mod_base = OTHER; note = 2-fluoro-modified nucleoside
  modified_base 16: mod_base = OTHER; note = 2-fluoro-modified nucleoside
  modified_base 18: mod_base = OTHER; note = 2-fluoro-modified nucleoside
tcttatcaaatgaatcttctt

SEQ ID NO: 3598 - RNA, 21 nt, synthetic construct
  source 1..21: mol_type = other RNA
  modified_base 1^2: mod_base = OTHER; note = phosphorothioate linkage
  modified_base 2^3: mod_base = OTHER; note = phosphorothioate linkage
  modified_base 19^20: mod_base = OTHER; note = phosphorothioate linkage
  modified_base 20^21: mod_base = OTHER; note = phosphorothioate linkage
  modified_base 2: mod_base = OTHER; note = 2-fluoro-modified nucleoside
  modified_base 4: mod_base = OTHER; note = 2-fluoro-modified nucleoside
  modified_base 6: mod_base = OTHER; note = 2-fluoro-modified nucleoside
  modified_base 8: mod_base = OTHER; note = 2-fluoro-modified nucleoside
  modified_base 10: mod_base = OTHER; note = 2-fluoro-modified nucleoside
  modified_base 12: mod_base = OTHER; note = 2-fluoro-modified nucleoside
  modified_base 14: mod_base = OTHER; note = 2-fluoro-modified nucleoside
  modified_base 16: mod_base = OTHER; note = 2-fluoro-modified nucleoside
  modified_base 18: mod_base = OTHER; note = 2-fluoro-modified nucleoside
tcagttgccttcaaacttatt

SEQ ID NO: 3599 - RNA, 21 nt, synthetic construct
  source 1..21: mol_type = other RNA
  modified_base 1: mod_base = OTHER; note = GalNAc#1; note = 2-O-methyl modified nucleoside
  modified_base 1^2: mod_base = OTHER; note = phosphorothioate linkage
  modified_base 2^3: mod_base = OTHER; note = phosphorothioate linkage
  modified_base 19^20: mod_base = OTHER; note = phosphorothioate linkage
  modified_base 20^21: mod_base = OTHER; note = phosphorothioate linkage
  modified_base 6: mod_base = OTHER; note = 2-fluoro-modified nucleoside
  modified_base 8: mod_base = OTHER; note = 2-fluoro-modified nucleoside
  modified_base 9: mod_base = OTHER; note = 2-fluoro-modified nucleoside
  modified_base 14: mod_base = OTHER; note = 2-O-methyl modified nucleoside
  modified_base 16: mod_base = OTHER; note = 2-O-methyl modified nucleoside
  modified_base 18: mod_base = OTHER; note = 2-O-methyl modified nucleoside
  modified_base 1: mod_base = OTHER; note = 2-O-methyl modified nucleoside
  modified_base 2: mod_base = OTHER; note = 2-O-methyl modified nucleoside
  modified_base 3: mod_base = OTHER; note = 2-O-methyl modified nucleoside
  modified_base 4: mod_base = OTHER; note = 2-O-methyl modified nucleoside
  modified_base 5: mod_base = OTHER; note = 2-O-methyl modified nucleoside
  modified_base 7: mod_base = OTHER; note = 2-O-methyl modified nucleoside
  modified_base 10: mod_base = OTHER; note = 2-O-methyl modified nucleoside
  modified_base 11: mod_base = OTHER; note = 2-O-methyl modified nucleoside
  modified_base 12: mod_base = OTHER; note = 2-O-methyl modified nucleoside
  modified_base 13: mod_base = OTHER; note = 2-O-methyl modified nucleoside
  modified_base 14: mod_base = OTHER; note = 2-O-methyl modified nucleoside
  modified_base 15: mod_base = OTHER; note = 2-O-methyl modified nucleoside
  modified_base 16: mod_base = OTHER; note = 2-O-methyl modified nucleoside
  modified_base 17: mod_base = OTHER; note = 2-O-methyl modified nucleoside
  modified_base 18: mod_base = OTHER; note = 2-O-methyl modified nucleoside
  modified_base 19: mod_base = OTHER; note = 2-O-methyl modified nucleoside
  modified_base 20: mod_base = OTHER; note = 2-O-methyl modified nucleoside
  modified_base 21: mod_base = OTHER; note = 2-O-methyl modified nucleoside
gatgaaagattcggtagtatt

SEQ ID NO: 3600 - RNA, 21 nt, synthetic construct
  source 1..21: mol_type = other RNA
  modified_base 1: mod_base = OTHER; note = GalNAc#1; note = 2-O-methyl modified nucleoside
  modified_base 1^2: mod_base = OTHER; note = phosphorothioate linkage
  modified_base 2^3: mod_base = OTHER; note = phosphorothioate linkage
  modified_base 19^20: mod_base = OTHER; note = phosphorothioate linkage
  modified_base 20^21: mod_base = OTHER; note = phosphorothioate linkage
  modified_base 6: mod_base = OTHER; note = 2-fluoro-modified nucleoside
  modified_base 7: mod_base = OTHER; note = 2-fluoro-modified nucleoside
  modified_base 9: mod_base = OTHER; note = 2-fluoro-modified nucleoside
gatgaaagattcggtagtatt

SEQ ID NO: 3601 - RNA, 21 nt, synthetic construct
  source 1..21: mol_type = other RNA
  modified_base 1^2: mod_base = OTHER; note = phosphorothioate linkage
  modified_base 2^3: mod_base = OTHER; note = phosphorothioate linkage
  modified_base 19^20: mod_base = OTHER; note = phosphorothioate linkage
  modified_base 20^21: mod_base = OTHER; note = phosphorothioate linkage
  modified_base 6: mod_base = OTHER; note = 2-fluoro-modified nucleoside
  modified_base 7: mod_base = OTHER; note = 2-fluoro-modified nucleoside
  modified_base 8: mod_base = OTHER; note = 2-fluoro-modified nucleoside
  modified_base 9: mod_base = OTHER; note = 2-fluoro-modified nucleoside
  modified_base 1: mod_base = OTHER; note = 2-O-methyl modified nucleoside; note = GalNAc#1
gatgaaagattcggtagtatt

SEQ ID NO: 3602 - RNA, 21 nt, synthetic construct
  source 1..21: mol_type = other RNA
  modified_base 1: mod_base = OTHER; note = GalNAc#1; note = 2-O-methyl modified nucleoside
  modified_base 1^2: mod_base = OTHER; note = phosphorothioate linkage
  modified_base 2^3: mod_base = OTHER; note = phosphorothioate linkage
  modified_base 19^20: mod_base = OTHER; note = phosphorothioate linkage
  modified_base 20^21: mod_base = OTHER; note = phosphorothioate linkage
  modified_base 5: mod_base = OTHER; note = 2-fluoro-modified nucleoside
  modified_base 8: mod_base = OTHER; note = 2-fluoro-modified nucleoside
  modified_base 9: mod_base = OTHER; note = 2-fluoro-modified nucleoside
gatgaaagattcggtagtatt

SEQ ID NO: 3603 - RNA, 21 nt, synthetic construct
  source 1..21: mol_type = other RNA
  modified_base 1: mod_base = OTHER; note = GalNAc#1; note = 2-O-methyl modified nucleoside
  modified_base 1^2: mod_base = OTHER; note = phosphorothioate linkage
  modified_base 2^3: mod_base = OTHER; note = phosphorothioate linkage
  modified_base 19^20: mod_base = OTHER; note = phosphorothioate linkage
  modified_base 20^21: mod_base = OTHER; note = phosphorothioate linkage
  modified_base 5: mod_base = OTHER; note = 2-fluoro-modified nucleoside
  modified_base 7: mod_base = OTHER; note = 2-fluoro-modified nucleoside
  modified_base 9: mod_base = OTHER; note = 2-fluoro-modified nucleoside
gatgaaagattcggtagtatt

SEQ ID NO: 3604 - RNA, 21 nt, synthetic construct
  source 1..21: mol_type = other RNA
  modified_base 1: mod_base = OTHER; note = 2-O-methyl modified nucleoside; note = GalNAc#1
  modified_base 1^2: mod_base = OTHER; note = phosphorothioate linkage
  modified_base 2^3: mod_base = OTHER; note = phosphorothioate linkage
  modified_base 19^20: mod_base = OTHER; note = phosphorothioate linkage
  modified_base 20^21: mod_base = OTHER; note = phosphorothioate linkage
  modified_base 5: mod_base = OTHER; note = 2-fluoro-modified nucleoside
  modified_base 6: mod_base = OTHER; note = 2-fluoro-modified nucleoside
  modified_base 9: mod_base = OTHER; note = 2-fluoro-modified nucleoside
gatgaaagattcggtagtatt

SEQ ID NO: 3605 - RNA, 21 nt, synthetic construct
  source 1..21: mol_type = other RNA
  modified_base 5: mod_base = OTHER; note = 2-fluoro-modified nucleoside
  modified_base 6: mod_base = OTHER; note = 2-fluoro-modified nucleoside
  modified_base 7: mod_base = OTHER; note = 2-fluoro-modified nucleoside
  modified_base 8: mod_base = OTHER; note = 2-fluoro-modified nucleoside
  modified_base 1: mod_base = OTHER; note = GalNAc#1; note = 2-O-methyl modified nucleoside
  modified_base 1^2: mod_base = OTHER; note = 2-fluoro-modified nucleoside
  modified_base 2^3: mod_base = OTHER; note = 2-fluoro-modified nucleoside
  modified_base 19^20: mod_base = OTHER; note = 2-fluoro-modified nucleoside
  modified_base 20^21: mod_base = OTHER; note = 2-fluoro-modified nucleoside
gatgaaagattcggtagtatt

SEQ ID NO: 3606 - RNA, 21 nt, synthetic construct
  source 1..21: mol_type = other RNA
  modified_base 1: mod_base = OTHER; note = 2-O-methyl modified nucleoside; note = GalNAc#1
  modified_base 1^2: mod_base = OTHER; note = phosphorothioate linkage
  modified_base 2^3: mod_base = OTHER; note = phosphorothioate linkage
  modified_base 19^20: mod_base = OTHER; note = phosphorothioate linkage
  modified_base 20^21: mod_base = OTHER; note = phosphorothioate linkage
  modified_base 8: mod_base = OTHER; note = 2-fluoro-modified nucleoside
  modified_base 9: mod_base = OTHER; note = 2-fluoro-modified nucleoside
  modified_base 11: mod_base = OTHER; note = 2-fluoro-modified nucleoside
ggaaatgagaagattcatatt

SEQ ID NO: 3607 - RNA, 21 nt, synthetic construct
  source 1..21: mol_type = other RNA
  modified_base 1: mod_base = OTHER; note = 2-O-methyl modified nucleoside; note = GalNAc#1
  modified_base 1^2: mod_base = OTHER; note = phosphorothioate linkage
  modified_base 2^3: mod_base = OTHER; note = phosphorothioate linkage
  modified_base 19^20: mod_base = OTHER; note = phosphorothioate linkage
  modified_base 20^21: mod_base = OTHER; note = phosphorothioate linkage
  modified_base 8: mod_base = OTHER; note = 2-fluoro-modified nucleoside
  modified_base 9: mod_base = OTHER; note = 2-fluoro-modified nucleoside
  modified_base 10: mod_base = OTHER; note = 2-fluoro-modified nucleoside
  modified_base 11: mod_base = OTHER; note = 2-fluoro-modified nucleoside
ggaaatgagaagattcatatt

SEQ ID NO: 3608 - RNA, 21 nt, synthetic construct
  source 1..21: mol_type = other RNA
  modified_base 1: mod_base = OTHER; note = GalNAc#1; note = 2-O-methyl modified nucleoside
  modified_base 1^2: mod_base = OTHER; note = phosphorothioate linkage
  modified_base 2^3: mod_base = OTHER; note = phosphorothioate linkage
  modified_base 19^20: mod_base = OTHER; note = phosphorothioate linkage
  modified_base 20^21: mod_base = OTHER; note = phosphorothioate linkage
  modified_base 7: mod_base = OTHER; note = 2-fluoro-modified nucleoside
  modified_base 9: mod_base = OTHER; note = 2-fluoro-modified nucleoside
  modified_base 11: mod_base = OTHER; note = 2-fluoro-modified nucleoside
ggaaatgagaagattcatatt

SEQ ID NO: 3609 - RNA, 21 nt, synthetic construct
  source 1..21: mol_type = other RNA
  modified_base 1: mod_base = OTHER; note = 2-O-methyl modified nucleoside; note = GalNAc#1
  modified_base 1^2: mod_base = OTHER; note = phosphorothioate linkage
  modified_base 2^3: mod_base = OTHER; note = phosphorothioate linkage
  modified_base 19^20: mod_base = OTHER; note = phosphorothioate linkage
  modified_base 20^21: mod_base = OTHER; note = phosphorothioate linkage
  modified_base 7: mod_base = OTHER; note = 2-fluoro-modified nucleoside
  modified_base 8: mod_base = OTHER; note = 2-fluoro-modified nucleoside
  modified_base 9: mod_base = OTHER; note = 2-fluoro-modified nucleoside
  modified_base 10: mod_base = OTHER; note = 2-fluoro-modified nucleoside
ggaaatgagaagattcatatt

SEQ ID NO: 3610 - RNA, 21 nt, synthetic construct
  source 1..21: mol_type = other RNA
  modified_base 1: mod_base = OTHER; note = GalNAc#1; note = 2-O-methyl modified nucleoside
  modified_base 1^2: mod_base = OTHER; note = phosphorothioate linkage
  modified_base 2^3: mod_base = OTHER; note = phosphorothioate linkage
  modified_base 19^20: mod_base = OTHER; note = phosphorothioate linkage
  modified_base 20^21: mod_base = OTHER; note = phosphorothioate linkage
  modified_base 7: mod_base = OTHER; note = 2-fluoro-modified nucleoside
  modified_base 8: mod_base = OTHER; note = 2-fluoro-modified nucleoside
  modified_base 9: mod_base = OTHER; note = 2-fluoro-modified nucleoside
  modified_base 10: mod_base = OTHER; note = 2-fluoro-modified nucleoside
  modified_base 11: mod_base = OTHER; note = 2-fluoro-modified nucleoside
ggaaatgagaagattcatatt

SEQ ID NO: 3611 - RNA, 21 nt, synthetic construct
  source 1..21: mol_type = other RNA
  modified_base 1: mod_base = OTHER; note = GalNAc#1; note = 2-O-methyl modified nucleoside
  modified_base 1^2: mod_base = OTHER; note = phosphorothioate linkage
  modified_base 2^3: mod_base = OTHER; note = phosphorothioate linkage
  modified_base 19^20: mod_base = OTHER; note = phosphorothioate linkage
  modified_base 20^21: mod_base = OTHER; note = phosphorothioate linkage
  modified_base 5: mod_base = OTHER; note = 2-fluoro-modified nucleoside
  modified_base 9: mod_base = OTHER; note = 2-fluoro-modified nucleoside
  modified_base 11: mod_base = OTHER; note = 2-fluoro-modified nucleoside
ggaaatgagaagattcatatt

SEQ ID NO: 3612 - RNA, 21 nt, synthetic construct
  source 1..21: mol_type = other RNA
  modified_base 1: mod_base = OTHER; note = GalNAc#1; note = 2-O-methyl modified nucleoside
  modified_base 1^2: mod_base = OTHER; note = phosphorothioate linkage
  modified_base 2^3: mod_base = OTHER; note = phosphorothioate linkage
  modified_base 19^20: mod_base = OTHER; note = phosphorothioate linkage
  modified_base 20^21: mod_base = OTHER; note = phosphorothioate linkage
  modified_base 5: mod_base = OTHER; note = 2-fluoro-modified nucleoside
  modified_base 9: mod_base = OTHER; note = 2-fluoro-modified nucleoside
  modified_base 10: mod_base = OTHER; note = 2-fluoro-modified nucleoside
ggaaatgagaagattcatatt

SEQ ID NO: 3613 - RNA, 21 nt, synthetic construct
  source 1..21: mol_type = other RNA
  modified_base 1: mod_base = OTHER; note = 2-O-methyl modified nucleoside; note = GalNAc#1
  modified_base 1^2: mod_base = OTHER; note = phosphorothioate linkage
  modified_base 2^3: mod_base = OTHER; note = phosphorothioate linkage
  modified_base 19^20: mod_base = OTHER; note = phosphorothioate linkage
  modified_base 20^21: mod_base = OTHER; note = phosphorothioate linkage
  modified_base 5: mod_base = OTHER; note = 2-fluoro-modified nucleoside
  modified_base 8: mod_base = OTHER; note = 2-fluoro-modified nucleoside
  modified_base 9: mod_base = OTHER; note = 2-fluoro-modified nucleoside
ggaaatgagaagattcatatt

SEQ ID NO: 3614 - RNA, 21 nt, synthetic construct
  source 1..21: mol_type = other RNA
  modified_base 1: mod_base = OTHER; note = 2-O-methyl modified nucleoside; note = GalNAc#1
  modified_base 1^2: mod_base = OTHER; note = phosphorothioate linkage
  modified_base 2^3: mod_base = OTHER; note = phosphorothioate linkage
  modified_base 19^20: mod_base = OTHER; note = phosphorothioate linkage
  modified_base 20^21: mod_base = OTHER; note = phosphorothioate linkage
  modified_base 5: mod_base = OTHER; note = 2-fluoro-modified nucleoside
  modified_base 8: mod_base = OTHER; note = 2-fluoro-modified nucleoside
  modified_base 9: mod_base = OTHER; note = 2-fluoro-modified nucleoside
ggaaatgagaagattcatatt

SEQ ID NO: 3615 - RNA, 21 nt, synthetic construct
  source 1..21: mol_type = other RNA
  modified_base 1: mod_base = OTHER; note = GalNAc#1; note = 2-O-methyl modified nucleoside
  modified_base 1^2: mod_base = OTHER; note = phosphorothioate linkage
  modified_base 2^3: mod_base = OTHER; note = phosphorothioate linkage
  modified_base 19^20: mod_base = OTHER; note = phosphorothioate linkage
  modified_base 20^21: mod_base = OTHER; note = phosphorothioate linkage
  modified_base 5: mod_base = OTHER; note = 2-fluoro-modified nucleoside
  modified_base 8: mod_base = OTHER; note = 2-fluoro-modified nucleoside
  modified_base 9: mod_base = OTHER; note = 2-fluoro-modified nucleoside
ggaaatgagaagattcatatt

SEQ ID NO: 3616 - RNA, 21 nt, synthetic construct
  source 1..21: mol_type = other RNA
  modified_base 1: mod_base = OTHER; note = 2-O-methyl modified nucleoside; note = GalNAc#1
  modified_base 1^2: mod_base = OTHER; note = phosphorothioate linkage
  modified_base 2^3: mod_base = OTHER; note = phosphorothioate linkage
  modified_base 19^20: mod_base = OTHER; note = phosphorothioate linkage
  modified_base 20^21: mod_base = OTHER; note = phosphorothioate linkage
  modified_base 5: mod_base = OTHER; note = 2-fluoro-modified nucleoside
  modified_base 7: mod_base = OTHER; note = 2-fluoro-modified nucleoside
  modified_base 9: mod_base = OTHER; note = 2-fluoro-modified nucleoside
ggaaatgagaagattcatatt

SEQ ID NO: 3617 - RNA, 21 nt, synthetic construct
  source 1..21: mol_type = other RNA
  modified_base 1: mod_base = OTHER; note = GalNAc#1; note = 2-O-methyl modified nucleoside
  modified_base 1^2: mod_base = OTHER; note = phosphorothioate linkage
  modified_base 2^3: mod_base = OTHER; note = phosphorothioate linkage
  modified_base 19^20: mod_base = OTHER; note = phosphorothioate linkage
  modified_base 20^21: mod_base = OTHER; note = phosphorothioate linkage
  modified_base 5: mod_base = OTHER; note = 2-fluoro-modified nucleoside
  modified_base 7: mod_base = OTHER; note = 2-fluoro-modified nucleoside
  modified_base 9: mod_base = OTHER; note = 2-fluoro-modified nucleoside
ggaaatgagaagattcatatt

SEQ ID NO: 3618 - RNA, 21 nt, synthetic construct
  source 1..21: mol_type = other RNA
  modified_base 1: mod_base = OTHER; note = GalNAc#1; note = 2-O-methyl modified nucleoside
  modified_base 1^2: mod_base = OTHER; note = phosphorothioate linkage
  modified_base 2^3: mod_base = OTHER; note = phosphorothioate linkage
  modified_base 19^20: mod_base = OTHER; note = phosphorothioate linkage
  modified_base 20^21: mod_base = OTHER; note = phosphorothioate linkage
  modified_base 5: mod_base = OTHER; note = 2-fluoro-modified nucleoside
  modified_base 7: mod_base = OTHER; note = 2-fluoro-modified nucleoside
  modified_base 9: mod_base = OTHER; note = 2-fluoro-modified nucleoside
  modified_base 10: mod_base = OTHER; note = 2-fluoro-modified nucleoside
ggaaatgagaagattcatatt

SEQ ID NO: 3619 - RNA, 21 nt, synthetic construct
  source 1..21: mol_type = other RNA
  modified_base 1: mod_base = OTHER; note = GalNAc#1; note = 2-O-methyl modified nucleoside
  modified_base 1^2: mod_base = OTHER; note = phosphorothioate linkage
  modified_base 2^3: mod_base = OTHER; note = phosphorothioate linkage
  modified_base 19^20: mod_base = OTHER; note = phosphorothioate linkage
  modified_base 20^21: mod_base = OTHER; note = phosphorothioate linkage
  modified_base 5: mod_base = OTHER; note = 2-fluoro-modified nucleoside
  modified_base 7: mod_base = OTHER; note = 2-fluoro-modified nucleoside
  modified_base 8: mod_base = OTHER; note = 2-fluoro-modified nucleoside
  modified_base 9: mod_base = OTHER; note = 2-fluoro-modified nucleoside
  modified_base 10: mod_base = OTHER; note = 2-fluoro-modified nucleoside
ggaaatgagaagattcatatt

SEQ ID NO: 3620 - RNA, 21 nt, synthetic construct
  source 1..21: mol_type = other RNA
  modified_base 1: mod_base = OTHER; note = GalNAc#1; note = 2-O-methyl modified nucleoside
  modified_base 1^2: mod_base = OTHER; note = phosphorothioate linkage
  modified_base 2^3: mod_base = OTHER; note = phosphorothioate linkage
  modified_base 19^20: mod_base = OTHER; note = phosphorothioate linkage
  modified_base 20^21: mod_base = OTHER; note = phosphorothioate linkage
  modified_base 8: mod_base = OTHER; note = 2-fluoro-modified nucleoside
  modified_base 9: mod_base = OTHER; note = 2-fluoro-modified nucleoside
  modified_base 11: mod_base = OTHER; note = 2-fluoro-modified nucleoside
taagtttgaaggcaactgatt

SEQ ID NO: 3621 - RNA, 1760 nt, synthetic construct
  source 1..1760: mol_type = other RNA
aaaaaggaggagcttcaacctgtgtgcaaaatctgggaacctgacagtataggttgggggccaggatgaggaaaaaggaacgggaaagacctgcccacccttctggtaaggaggccccgtgatcagctccagccatttgcagtcctggctatcccaggagcttacataaagggacaattggagcctgagaggtgacagtgctgacactacaaggctcggagctccgggcactcagacatcatgagttggtccttgcacccccggaatttaattctctacttctatgctcttttatttctctcttcaacatgtgtagcatatgttgctaccagagacaactgctgcatcttagatgaaagattcggtagttattgtccaactacctgtggcattgcagatttcctgtctacttatcaaaccaaagtagacaaggatctacagtctttggaagacatcttacatcaagttgaaaacaaaacatcagaagtcaaacagctgataaaagcaatccaactcacttataatcctgatgaatcatcaaaaccaaatatgatagacgctgctactttgaagtccaggaaaatgttagaagaaattatgaaatatgaagcatcgattttaacacatgactcaagtattcgatatttgcaggaaatatataattcaaataatcaaaagattgttaacctgaaagagaaggtagcccagcttgaagcacagtgccaggaaccttgcaaagacacggtgcaaatccatgatatcactgggaaagattgtcaagacattgccaataagggagctaaacagagcgggctttactttattaaacctctgaaagctaaccagcaattcttagtctactgtgaaatcgatgggtctggaaatggatggactgtgtttcagaagagacttgatggcagtgtagatttcaagaaaaactggattcaatataaagaaggatttggacatctgtctcctactggcacaacagaattttggctgggaaatgagaagattcatttgataagcacacagtctgccatcccatatgcattaagagtggaactggaagactggaatggcagaaccagtactgcagactatgccatgttcaaggtgggacctgaagctgacaagtaccgcctaacatatgcctacttcgctggtggggatgctggagatgcctttgatggctttgattttggcgatgatcctagtgacaagtttttcacatcccataatggcatgcagttcagtacctgggacaatgacaatgataagtttgaaggcaactgtgctgaacaggatggatctggttggtggatgaacaagtgtcacgctggccatctcaatggagtttattaccaaggtggcacttactcaaaagcatctactcctaatggttatgataatggcattatttgggccacttggaaaacccggtggtattccatgaagaaaaccactatgaagataatcccattcaacagactcacaattggagaaggacagcaacaccacctggggggagccaaacaggctggagacgtttaaaagaccgtttcaaaagagatttacttttttaaaggactttatctgaacagagagatataatatttttcctattggacaatggacttgcaaagcttcacttcattttaagagcaaaagaccccatgttgaaaactccataacagttttatgctgatgataatttatctacatgcatttcaataaaccttttgtttcctaagactaga

SEQ ID NO: 3622-3640 - skipped (19 entries)

SEQ ID NO: 3641 - RNA, 21 nt, synthetic construct
  source 1..21: mol_type = other RNA
  modified_base 1: mod_base = OTHER; note = 2-O-methyl modified nucleoside; note = GalNAc
  modified_base 5: mod_base = OTHER; note = 2-fluoro-modified nucleoside
  modified_base 6: mod_base = OTHER; note = 2-fluoro-modified nucleoside
  modified_base 8: mod_base = OTHER; note = 2-fluoro-modified nucleoside
  modified_base 9: mod_base = OTHER; note = 2-fluoro-modified nucleoside
  modified_base 2: mod_base = OTHER; note = 2-O-methyl modified nucleoside
  modified_base 3: mod_base = OTHER; note = 2-O-methyl modified nucleoside
  modified_base 4: mod_base = OTHER; note = 2-O-methyl modified nucleoside
  modified_base 7: mod_base = OTHER; note = 2-O-methyl modified nucleoside
  modified_base 10: mod_base = OTHER; note = 2-O-methyl modified nucleoside
  modified_base 11: mod_base = OTHER; note = 2-O-methyl modified nucleoside
  modified_base 12: mod_base = OTHER; note = 2-O-methyl modified nucleoside
  modified_base 13: mod_base = OTHER; note = 2-O-methyl modified nucleoside
  modified_base 14: mod_base = OTHER; note = 2-O-methyl modified nucleoside
  modified_base 15: mod_base = OTHER; note = 2-O-methyl modified nucleoside
  modified_base 16: mod_base = OTHER; note = 2-O-methyl modified nucleoside
  modified_base 17: mod_base = OTHER; note = 2-O-methyl modified nucleoside
  modified_base 18: mod_base = OTHER; note = 2-O-methyl modified nucleoside
  modified_base 19: mod_base = OTHER; note = 2-O-methyl modified nucleoside
  modified_base 20: mod_base = OTHER; note = 2-O-methyl modified nucleoside
  modified_base 21: mod_base = OTHER; note = 2-O-methyl modified nucleoside
  modified_base 1^2: mod_base = OTHER; note = phosphorothioate linkage
  modified_base 2^3: mod_base = OTHER; note = phosphorothioate linkage
  modified_base 19^20: mod_base = OTHER; note = phosphorothioate linkage
  modified_base 20^21: mod_base = OTHER; note = phosphorothioate linkage
gatgaaagattcggtagtatt

SEQ ID NO: 3642 - RNA, 21 nt, synthetic construct
  source 1..21: mol_type = other RNA
  modified_base 5: mod_base = OTHER; note = 2-fluoro-modified nucleoside
  modified_base 9: mod_base = OTHER; note = 2-fluoro-modified nucleoside
  modified_base 1: mod_base = OTHER; note = GalNAc; note = 2-O-methyl modified nucleoside
  modified_base 2: mod_base = OTHER; note = 2-O-methyl modified nucleoside
  modified_base 3: mod_base = OTHER; note = 2-O-methyl modified nucleoside
  modified_base 4: mod_base = OTHER; note = 2-O-methyl modified nucleoside
  modified_base 6: mod_base = OTHER; note = 2-O-methyl modified nucleoside
  modified_base 7: mod_base = OTHER; note = 2-O-methyl modified nucleoside
  modified_base 8: mod_base = OTHER; note = 2-O-methyl modified nucleoside
  modified_base 10: mod_base = OTHER; note = 2-O-methyl modified nucleoside
  modified_base 11: mod_base = OTHER; note = 2-O-methyl modified nucleoside
  modified_base 12: mod_base = OTHER; note = 2-O-methyl modified nucleoside
  modified_base 13: mod_base = OTHER; note = 2-O-methyl modified nucleoside
  modified_base 14: mod_base = OTHER; note = 2-O-methyl modified nucleoside
  modified_base 15: mod_base = OTHER; note = 2-O-methyl modified nucleoside
  modified_base 16: mod_base = OTHER; note = 2-O-methyl modified nucleoside
  modified_base 17: mod_base = OTHER; note = 2-O-methyl modified nucleoside
  modified_base 18: mod_base = OTHER; note = 2-O-methyl modified nucleoside
  modified_base 19: mod_base = OTHER; note = 2-O-methyl modified nucleoside
  modified_base 20: mod_base = OTHER; note = 2-O-methyl modified nucleoside
  modified_base 21: mod_base = OTHER; note = 2-O-methyl modified nucleoside
  modified_base 1^2: mod_base = OTHER; note = phosphorothioate linkage
  modified_base 3^4: mod_base = OTHER; note = phosphorothioate linkage
  modified_base 19^20: mod_base = OTHER; note = phosphorothioate linkage
  modified_base 20^21: mod_base = OTHER; note = phosphorothioate linkage
gaagattcatttgataagatt

SEQ ID NO: 3643 - RNA, 21 nt, synthetic construct
  source 1..21: mol_type = other RNA
  modified_base 1: mod_base = OTHER; note = GalNAc; note = 2-O-methyl modified nucleoside
  modified_base 5: mod_base = OTHER; note = 2-fluoro-modified nucleoside
  modified_base 6: mod_base = OTHER; note = 2-fluoro-modified nucleoside
  modified_base 8: mod_base = OTHER; note = 2-fluoro-modified nucleoside
  modified_base 9: mod_base = OTHER; note = 2-fluoro-modified nucleoside
  modified_base 14: mod_base = OTHER; note = 2-fluoro-modified nucleoside
  modified_base 15: mod_base = OTHER; note = 2-O-methyl modified nucleoside
  modified_base 2: mod_base = OTHER; note = 2-O-methyl modified nucleoside
  modified_base 3: mod_base = OTHER; note = 2-O-methyl modified nucleoside
  modified_base 4: mod_base = OTHER; note = 2-O-methyl modified nucleoside
  modified_base 10: mod_base = OTHER; note = 2-O-methyl modified nucleoside
  modified_base 11: mod_base = OTHER; note = 2-O-methyl modified nucleoside
  modified_base 12: mod_base = OTHER; note = 2-O-methyl modified nucleoside
  modified_base 16: mod_base = OTHER; note = 2-O-methyl modified nucleoside
  modified_base 17: mod_base = OTHER; note = 2-fluoro-modified nucleoside
  modified_base 18: mod_base = OTHER; note = 2-O-methyl modified nucleoside
  modified_base 19: mod_base = OTHER; note = 2-O-methyl modified nucleoside
  modified_base 20: mod_base = OTHER; note = 2-O-methyl modified nucleoside
  modified_base 21: mod_base = OTHER; note = 2-O-methyl modified nucleoside
  modified_base 13: mod_base = OTHER; note = 2-O-methyl modified nucleoside
  modified_base 1^2: mod_base = OTHER; note = phosphorothioate linkage
  modified_base 2^3: mod_base = OTHER; note = phosphorothioate linkage
  modified_base 19^20: mod_base = OTHER; note = phosphorothioate linkage
  modified_base 20^21: mod_base = OTHER; note = phosphorothioate linkage
gatgaaagattcggtagtatt

SEQ ID NO: 3644 - RNA, 21 nt, synthetic construct
  source 1..21: mol_type = other RNA
  modified_base 1: mod_base = OTHER; note = GalNAc; note = 2-O-methyl modified nucleoside
  modified_base 5: mod_base = OTHER; note = 2-fluoro-modified nucleoside
  modified_base 6: mod_base = OTHER; note = 2-fluoro-modified nucleoside
  modified_base 9: mod_base = OTHER; note = 2-fluoro-modified nucleoside
  modified_base 11: mod_base = OTHER; note = 2-fluoro-modified nucleoside
  modified_base 12: mod_base = OTHER; note = 2-fluoro-modified nucleoside
  modified_base 15: mod_base = OTHER; note = 2-fluoro-modified nucleoside
  modified_base 8: mod_base = OTHER; note = any deoxynucleotide
  modified_base 2: mod_base = OTHER; note = 2-O-methyl modified nucleoside
  modified_base 3: mod_base = OTHER; note = 2-O-methyl modified nucleoside
  modified_base 4: mod_base = OTHER; note = 2-O-methyl modified nucleoside
  modified_base 7: mod_base = OTHER; note = 2-O-methyl modified nucleoside
  modified_base 10: mod_base = OTHER; note = 2-O-methyl modified nucleoside
  modified_base 13: mod_base = OTHER; note = 2-O-methyl modified nucleoside
  modified_base 14: mod_base = OTHER; note = 2-O-methyl modified nucleoside
  modified_base 16: mod_base = OTHER; note = 2-O-methyl modified nucleoside
  modified_base 17: mod_base = OTHER; note = 2-O-methyl modified nucleoside
  modified_base 18: mod_base = OTHER; note = 2-O-methyl modified nucleoside
  modified_base 20: mod_base = OTHER; note = 2-O-methyl modified nucleoside
  modified_base 19: mod_base = OTHER; note = 2-O-methyl modified nucleoside
  modified_base 21: mod_base = OTHER; note = 2-O-methyl modified nucleoside
  modified_base 1^2: mod_base = OTHER; note = phosphorothioate linkage
  modified_base 2^3: mod_base = OTHER; note = phosphorothioate linkage
  modified_base 19^20: mod_base = OTHER; note = phosphorothioate linkage
  modified_base 20^21: mod_base = OTHER; note = phosphorothioate linkage
gatgaaagattcggtagtatt

SEQ ID NO: 3645 - RNA, 21 nt, synthetic construct
  source 1..21: mol_type = other RNA
  modified_base 1: mod_base = OTHER; note = GalNAc; note = 2-O-methyl modified nucleoside
  modified_base 3: mod_base = OTHER; note = 2-fluoro-modified nucleoside
  modified_base 4: mod_base = OTHER; note = 2-fluoro-modified nucleoside
  modified_base 9: mod_base = OTHER; note = 2-fluoro-modified nucleoside
  modified_base 14: mod_base = OTHER; note = 2-fluoro-modified nucleoside
  modified_base 16: mod_base = OTHER; note = 2-fluoro-modified nucleoside
  modified_base 17: mod_base = OTHER; note = 2-fluoro-modified nucleoside
  modified_base 2: mod_base = OTHER; note = 2-O-methyl modified nucleoside
  modified_base 5: mod_base = OTHER; note = 2-O-methyl modified nucleoside
  modified_base 6: mod_base = OTHER; note = 2-O-methyl modified nucleoside
  modified_base 7: mod_base = OTHER; note = 2-O-methyl modified nucleoside
  modified_base 8: mod_base = OTHER; note = 2-O-methyl modified nucleoside
  modified_base 10: mod_base = OTHER; note = 2-O-methyl modified nucleoside
  modified_base 11: mod_base = OTHER; note = 2-O-methyl modified nucleoside
  modified_base 12: mod_base = OTHER; note = 2-O-methyl modified nucleoside
  modified_base 13: mod_base = OTHER; note = 2-O-methyl modified nucleoside
  modified_base 15: mod_base = OTHER; note = 2-O-methyl modified nucleoside
  modified_base 18: mod_base = OTHER; note = 2-O-methyl modified nucleoside
  modified_base 19: mod_base = OTHER; note = 2-O-methyl modified nucleoside
  modified_base 20: mod_base = OTHER; note = 2-O-methyl modified nucleoside
  modified_base 21: mod_base = OTHER; note = 2-O-methyl modified nucleoside
  modified_base 1^2: mod_base = OTHER; note = phosphorothioate linkage
  modified_base 2^3: mod_base = OTHER; note = phosphorothioate linkage
  modified_base 19^20: mod_base = OTHER; note = phosphorothioate linkage
  modified_base 20^21: mod_base = OTHER; note = phosphorothioate linkage
gaagattcatttgataagatt

SEQ ID NO: 3646 - RNA, 21 nt, synthetic construct
  source 1..21: mol_type = other RNA
  modified_base 1: mod_base = OTHER; note = 2-O-methyl modified nucleoside; note = GalNAc
  modified_base 8: mod_base = OTHER; note = any deoxynucleotide
  modified_base 3: mod_base = OTHER; note = 2-fluoro-modified nucleoside
  modified_base 5: mod_base = OTHER; note = 2-fluoro-modified nucleoside
  modified_base 7: mod_base = OTHER; note = 2-fluoro-modified nucleoside
  modified_base 9: mod_base = OTHER; note = 2-fluoro-modified nucleoside
  modified_base 11: mod_base = OTHER; note = 2-fluoro-modified nucleoside
  modified_base 12: mod_base = OTHER; note = 2-fluoro-modified nucleoside
  modified_base 15: mod_base = OTHER; note = 2-fluoro-modified nucleoside
  modified_base 2: mod_base = OTHER; note = 2-O-methyl modified nucleoside
  modified_base 4: mod_base = OTHER; note = 2-O-methyl modified nucleoside
  modified_base 6: mod_base = OTHER; note = 2-O-methyl modified nucleoside
  modified_base 10: mod_base = OTHER; note = 2-O-methyl modified nucleoside
  modified_base 13: mod_base = OTHER; note = 2-O-methyl modified nucleoside
  modified_base 14: mod_base = OTHER; note = 2-O-methyl modified nucleoside
  modified_base 16: mod_base = OTHER; note = 2-O-methyl modified nucleoside
  modified_base 17: mod_base = OTHER; note = 2-O-methyl modified nucleoside
  modified_base 18: mod_base = OTHER; note = 2-O-methyl modified nucleoside
  modified_base 19: mod_base = OTHER; note = 2-O-methyl modified nucleoside
  modified_base 20: mod_base = OTHER; note = 2-O-methyl modified nucleoside
  modified_base 21: mod_base = OTHER; note = 2-O-methyl modified nucleoside
  modified_base 1^2: mod_base = OTHER; note = phosphorothioate linkage
  modified_base 2^3: mod_base = OTHER; note = phosphorothioate linkage
  modified_base 19^20: mod_base = OTHER; note = phosphorothioate linkage
  modified_base 20^21: mod_base = OTHER; note = phosphorothioate linkage
gaagattcatttgataagatt

SEQ ID NO: 3647 - RNA, 21 nt, synthetic construct
  source 1..21: mol_type = other RNA
  modified_base 1: mod_base = OTHER; note = 2-O-methyl modified nucleoside; note = GalNAc
  modified_base 5: mod_base = OTHER; note = 2-fluoro-modified nucleoside
  modified_base 7: mod_base = OTHER; note = 2-fluoro-modified nucleoside
  modified_base 8: mod_base = OTHER; note = 2-fluoro-modified nucleoside
  modified_base 9: mod_base = OTHER; note = 2-fluoro-modified nucleoside
  modified_base 10: mod_base = OTHER; note = 2-fluoro-modified nucleoside
  modified_base 2: mod_base = OTHER; note = 2-O-methyl modified nucleoside
  modified_base 3: mod_base = OTHER; note = 2-O-methyl modified nucleoside
  modified_base 4: mod_base = OTHER; note = 2-O-methyl modified nucleoside
  modified_base 6: mod_base = OTHER; note = 2-O-methyl modified nucleoside
  modified_base 11: mod_base = OTHER; note = 2-O-methyl modified nucleoside
  modified_base 12: mod_base = OTHER; note = 2-O-methyl modified nucleoside
  modified_base 13: mod_base = OTHER; note = 2-O-methyl modified nucleoside
  modified_base 14: mod_base = OTHER; note = 2-O-methyl modified nucleoside
  modified_base 15: mod_base = OTHER; note = 2-O-methyl modified nucleoside
  modified_base 16: mod_base = OTHER; note = 2-O-methyl modified nucleoside
  modified_base 17: mod_base = OTHER; note = 2-O-methyl modified nucleoside
  modified_base 18: mod_base = OTHER; note = 2-O-methyl modified nucleoside
  modified_base 19: mod_base = OTHER; note = 2-O-methyl modified nucleoside
  modified_base 20: mod_base = OTHER; note = 2-O-methyl modified nucleoside
  modified_base 21: mod_base = OTHER; note = 2-O-methyl modified nucleoside
  modified_base 1^2: mod_base = OTHER; note = phosphorothioate linkage
  modified_base 2^3: mod_base = OTHER; note = phosphorothioate linkage
  modified_base 19^20: mod_base = OTHER; note = phosphorothioate linkage
  modified_base 20^21: mod_base = OTHER; note = phosphorothioate linkage
ctcaatggagtttattacatt

SEQ ID NO: 3648 - RNA, 21 nt, synthetic construct
  source 1..21: mol_type = other RNA
  modified_base 6: mod_base = OTHER; note = 2-fluoro-modified nucleoside
  modified_base 7: mod_base = OTHER; note = 2-fluoro-modified nucleoside
  modified_base 8: mod_base = OTHER; note = 2-fluoro-modified nucleoside
  modified_base 9: mod_base = OTHER; note = 2-fluoro-modified nucleoside
  modified_base 1: mod_base = OTHER; note = GalNAc; note = 2-O-methyl modified nucleoside
  modified_base 2: mod_base = OTHER; note = 2-O-methyl modified nucleoside
  modified_base 3: mod_base = OTHER; note = 2-O-methyl modified nucleoside
  modified_base 4: mod_base = OTHER; note = 2-O-methyl modified nucleoside
  modified_base 5: mod_base = OTHER; note = 2-O-methyl modified nucleoside
  modified_base 10: mod_base = OTHER; note = 2-O-methyl modified nucleoside
  modified_base 11: mod_base = OTHER; note = 2-O-methyl modified nucleoside
  modified_base 12: mod_base = OTHER; note = 2-O-methyl modified nucleoside
  modified_base 13: mod_base = OTHER; note = 2-O-methyl modified nucleoside
  modified_base 14: mod_base = OTHER; note = 2-O-methyl modified nucleoside
  modified_base 15: mod_base = OTHER; note = 2-O-methyl modified nucleoside
  modified_base 16: mod_base = OTHER; note = 2-O-methyl modified nucleoside
  modified_base 17: mod_base = OTHER; note = 2-O-methyl modified nucleoside
  modified_base 18: mod_base = OTHER; note = 2-O-methyl modified nucleoside
  modified_base 19: mod_base = OTHER; note = 2-O-methyl modified nucleoside
  modified_base 20: mod_base = OTHER; note = 2-O-methyl modified nucleoside
  modified_base 21: mod_base = OTHER; note = 2-O-methyl modified nucleoside
  modified_base 1^2: mod_base = OTHER; note = phosphorothioate linkage
  modified_base 2^3: mod_base = OTHER; note = phosphorothioate linkage
  modified_base 19^20: mod_base = OTHER; note = phosphorothioate linkage
  modified_base 20^21: mod_base = OTHER; note = phosphorothioate linkage
tcaatggagtttattaccatt

SEQ ID NO: 3649 - RNA, 21 nt, synthetic construct
  source 1..21: mol_type = other RNA
  modified_base 1: mod_base = OTHER; note = GalNAc; note = 2-O-methyl modified nucleoside
  modified_base 5: mod_base = OTHER; note = 2-fluoro-modified nucleoside
  modified_base 6: mod_base = OTHER; note = 2-fluoro-modified nucleoside
  modified_base 8: mod_base = OTHER; note = 2-fluoro-modified nucleoside
  modified_base 9: mod_base = OTHER; note = 2-fluoro-modified nucleoside
  modified_base 2: mod_base = OTHER; note = 2-O-methyl modified nucleoside
  modified_base 3: mod_base = OTHER; note = 2-O-methyl modified nucleoside
  modified_base 7: mod_base = OTHER; note = 2-O-methyl modified nucleoside
  modified_base 10: mod_base = OTHER; note = 2-O-methyl modified nucleoside
  modified_base 11: mod_base = OTHER; note = 2-O-methyl modified nucleoside
  modified_base 12: mod_base = OTHER; note = 2-O-methyl modified nucleoside
  modified_base 13: mod_base = OTHER; note = 2-O-methyl modified nucleoside
  modified_base 14: mod_base = OTHER; note = 2-O-methyl modified nucleoside
  modified_base 15: mod_base = OTHER; note = 2-O-methyl modified nucleoside
  modified_base 16: mod_base = OTHER; note = 2-O-methyl modified nucleoside
  modified_base 17: mod_base = OTHER; note = 2-O-methyl modified nucleoside
  modified_base 18: mod_base = OTHER; note = 2-O-methyl modified nucleoside
  modified_base 19: mod_base = OTHER; note = 2-O-methyl modified nucleoside
  modified_base 20: mod_base = OTHER; note = 2-O-methyl modified nucleoside
  modified_base 21: mod_base = OTHER; note = 2-O-methyl modified nucleoside
  modified_base 4: mod_base = OTHER; note = 2-O-methyl modified nucleoside
  modified_base 1^2: mod_base = OTHER; note = phosphorothioate linkage
  modified_base 2^3: mod_base = OTHER; note = phosphorothioate linkage
  modified_base 19^20: mod_base = OTHER; note = phosphorothioate linkage
  modified_base 20^21: mod_base = OTHER; note = phosphorothioate linkage
gatgaaagattcggtagtatt

SEQ ID NO: 3650 - RNA, 21 nt, synthetic construct
  source 1..21: mol_type = other RNA
  modified_base 1: mod_base = OTHER; note = 2-O-methyl modified nucleoside; note = GalNAc
  modified_base 5: mod_base = OTHER; note = 2-fluoro-modified nucleoside
  modified_base 6: mod_base = OTHER; note = 2-fluoro-modified nucleoside
  modified_base 8: mod_base = OTHER; note = 2-fluoro-modified nucleoside
  modified_base 9: mod_base = OTHER; note = 2-fluoro-modified nucleoside
  modified_base 2: mod_base = OTHER; note = 2-O-methyl modified nucleoside
  modified_base 3: mod_base = OTHER; note = 2-O-methyl modified nucleoside
  modified_base 4: mod_base = OTHER; note = 2-O-methyl modified nucleoside
  modified_base 7: mod_base = OTHER; note = 2-O-methyl modified nucleoside
  modified_base 10: mod_base = OTHER; note = 2-O-methyl modified nucleoside
  modified_base 11: mod_base = OTHER; note = 2-O-methyl modified nucleoside
  modified_base 12: mod_base = OTHER; note = 2-O-methyl modified nucleoside
  modified_base 13: mod_base = OTHER; note = 2-O-methyl modified nucleoside
  modified_base 14: mod_base = OTHER; note = 2-O-methyl modified nucleoside
  modified_base 15: mod_base = OTHER; note = 2-O-methyl modified nucleoside
  modified_base 16: mod_base = OTHER; note = 2-O-methyl modified nucleoside
  modified_base 17: mod_base = OTHER; note = 2-O-methyl modified nucleoside
  modified_base 18: mod_base = OTHER; note = 2-O-methyl modified nucleoside
  modified_base 19: mod_base = OTHER; note = 2-O-methyl modified nucleoside
  modified_base 20: mod_base = OTHER; note = 2-O-methyl modified nucleoside
  modified_base 21: mod_base = OTHER; note = 2-O-methyl modified nucleoside
  modified_base 1^2: mod_base = OTHER; note = phosphorothioate linkage
  modified_base 2^3: mod_base = OTHER; note = phosphorothioate linkage
  modified_base 19^20: mod_base = OTHER; note = phosphorothioate linkage
  modified_base 20^21: mod_base = OTHER; note = phosphorothioate linkage
gatgaaagattcggtagtatt

SEQ ID NO: 3651 - RNA, 21 nt, synthetic construct
  source 1..21: mol_type = other RNA
  modified_base 1: mod_base = OTHER; note = 2-O-methyl modified nucleoside; note = GalNAc
  modified_base 5: mod_base = OTHER; note = 2-fluoro-modified nucleoside
  modified_base 9: mod_base = OTHER; note = 2-fluoro-modified nucleoside
  modified_base 2: mod_base = OTHER; note = 2-O-methyl modified nucleoside
  modified_base 3: mod_base = OTHER; note = 2-O-methyl modified nucleoside
  modified_base 4: mod_base = OTHER; note = 2-O-methyl modified nucleoside
  modified_base 6: mod_base = OTHER; note = 2-O-methyl modified nucleoside
  modified_base 7: mod_base = OTHER; note = 2-O-methyl modified nucleoside
  modified_base 8: mod_base = OTHER; note = 2-O-methyl modified nucleoside
  modified_base 10: mod_base = OTHER; note = 2-O-methyl modified nucleoside
  modified_base 11: mod_base = OTHER; note = 2-O-methyl modified nucleoside
  modified_base 12: mod_base = OTHER; note = 2-O-methyl modified nucleoside
  modified_base 13: mod_base = OTHER; note = 2-O-methyl modified nucleoside
  modified_base 14: mod_base = OTHER; note = 2-O-methyl modified nucleoside
  modified_base 15: mod_base = OTHER; note = 2-O-methyl modified nucleoside
  modified_base 16: mod_base = OTHER; note = 2-O-methyl modified nucleoside
  modified_base 17: mod_base = OTHER; note = 2-O-methyl modified nucleoside
  modified_base 18: mod_base = OTHER; note = 2-O-methyl modified nucleoside
  modified_base 19: mod_base = OTHER; note = 2-O-methyl modified nucleoside
  modified_base 20: mod_base = OTHER; note = 2-O-methyl modified nucleoside
  modified_base 21: mod_base = OTHER; note = 2-O-methyl modified nucleoside
  modified_base 1^2: mod_base = OTHER; note = phosphorothioate linkage
  modified_base 2^3: mod_base = OTHER; note = phosphorothioate linkage
  modified_base 19^20: mod_base = OTHER; note = phosphorothioate linkage
  modified_base 20^21: mod_base = OTHER; note = phosphorothioate linkage
gaagattcatttgataagatt

SEQ ID NO: 3652 - RNA, 21 nt, synthetic construct
  source 1..21: mol_type = other RNA
  modified_base 1: mod_base = OTHER; note = 2-O-methyl modified nucleoside; note = GalNAc
  modified_base 5: mod_base = OTHER; note = 2-fluoro-modified nucleoside
  modified_base 6: mod_base = OTHER; note = 2-fluoro-modified nucleoside
  modified_base 8: mod_base = OTHER; note = 2-fluoro-modified nucleoside
  modified_base 9: mod_base = OTHER; note = 2-fluoro-modified nucleoside
  modified_base 2: mod_base = OTHER; note = 2-O-methyl modified nucleoside
  modified_base 3: mod_base = OTHER; note = 2-O-methyl modified nucleoside
  modified_base 4: mod_base = OTHER; note = 2-O-methyl modified nucleoside
  modified_base 7: mod_base = OTHER; note = 2-O-methyl modified nucleoside
  modified_base 10: mod_base = OTHER; note = 2-O-methyl modified nucleoside
  modified_base 11: mod_base = OTHER; note = 2-O-methyl modified nucleoside
  modified_base 12: mod_base = OTHER; note = 2-O-methyl modified nucleoside
  modified_base 13: mod_base = OTHER; note = 2-O-methyl modified nucleoside
  modified_base 14: mod_base = OTHER; note = 2-O-methyl modified nucleoside
  modified_base 15: mod_base = OTHER; note = 2-O-methyl modified nucleoside
  modified_base 16: mod_base = OTHER; note = 2-O-methyl modified nucleoside
  modified_base 17: mod_base = OTHER; note = 2-O-methyl modified nucleoside
  modified_base 18: mod_base = OTHER; note = 2-O-methyl modified nucleoside
  modified_base 19: mod_base = OTHER; note = 2-O-methyl modified nucleoside
  modified_base 20: mod_base = OTHER; note = 2-O-methyl modified nucleoside
  modified_base 21: mod_base = OTHER; note = 2-O-methyl modified nucleoside
  modified_base 1^2: mod_base = OTHER; note = phosphorothioate linkage
  modified_base 2^3: mod_base = OTHER; note = phosphorothioate linkage
  modified_base 19^20: mod_base = OTHER; note = phosphorothioate linkage
  modified_base 20^21: mod_base = OTHER; note = phosphorothioate linkage
gatgaaagattcggtagtatt

SEQ ID NO: 3653 - RNA, 21 nt, synthetic construct
  source 1..21: mol_type = other RNA
  modified_base 1: mod_base = OTHER; note = GalNAc; note = 2-O-methyl modified nucleoside
  modified_base 5: mod_base = OTHER; note = 2-fluoro-modified nucleoside
  modified_base 6: mod_base = OTHER; note = 2-fluoro-modified nucleoside
  modified_base 8: mod_base = OTHER; note = 2-fluoro-modified nucleoside
  modified_base 9: mod_base = OTHER; note = 2-fluoro-modified nucleoside
  modified_base 2: mod_base = OTHER; note = 2-O-methyl modified nucleoside
  modified_base 3: mod_base = OTHER; note = 2-O-methyl modified nucleoside
  modified_base 4: mod_base = OTHER; note = 2-O-methyl modified nucleoside
  modified_base 7: mod_base = OTHER; note = 2-O-methyl modified nucleoside
  modified_base 10: mod_base = OTHER; note = 2-O-methyl modified nucleoside
  modified_base 11: mod_base = OTHER; note = 2-O-methyl modified nucleoside
  modified_base 12: mod_base = OTHER; note = 2-O-methyl modified nucleoside
  modified_base 13: mod_base = OTHER; note = 2-O-methyl modified nucleoside
  modified_base 14: mod_base = OTHER; note = 2-O-methyl modified nucleoside
  modified_base 15: mod_base = OTHER; note = 2-O-methyl modified nucleoside
  modified_base 16: mod_base = OTHER; note = 2-O-methyl modified nucleoside
  modified_base 17: mod_base = OTHER; note = 2-O-methyl modified nucleoside
  modified_base 18: mod_base = OTHER; note = 2-O-methyl modified nucleoside
  modified_base 19: mod_base = OTHER; note = 2-O-methyl modified nucleoside
  modified_base 20: mod_base = OTHER; note = 2-O-methyl modified nucleoside
  modified_base 21: mod_base = OTHER; note = 2-O-methyl modified nucleoside
  modified_base 1^2: mod_base = OTHER; note = phosphorothioate linkage
  modified_base 2^3: mod_base = OTHER; note = phosphorothioate linkage
  modified_base 19^20: mod_base = OTHER; note = phosphorothioate linkage
  modified_base 20^21: mod_base = OTHER; note = phosphorothioate linkage
gatgaaagattcggtagtatt

SEQ ID NO: 3654 - RNA, 21 nt, synthetic construct
  source 1..21: mol_type = other RNA
  modified_base 1: mod_base = OTHER; note = GalNAc; note = 2-O-methyl modified nucleoside
  modified_base 5: mod_base = OTHER; note = 2-fluoro-modified nucleoside
  modified_base 6: mod_base = OTHER; note = 2-fluoro-modified nucleoside
  modified_base 8: mod_base = OTHER; note = 2-fluoro-modified nucleoside
  modified_base 9: mod_base = OTHER; note = 2-fluoro-modified nucleoside
  modified_base 2: mod_base = OTHER; note = 2-O-methyl modified nucleoside
  modified_base 3: mod_base = OTHER; note = 2-O-methyl modified nucleoside
  modified_base 4: mod_base = OTHER; note = 2-O-methyl modified nucleoside
  modified_base 7: mod_base = OTHER; note = 2-O-methyl modified nucleoside
  modified_base 10: mod_base = OTHER; note = 2-O-methyl modified nucleoside
  modified_base 11: mod_base = OTHER; note = 2-O-methyl modified nucleoside
  modified_base 12: mod_base = OTHER; note = 2-O-methyl modified nucleoside
  modified_base 13: mod_base = OTHER; note = 2-O-methyl modified nucleoside
  modified_base 14: mod_base = OTHER; note = 2-O-methyl modified nucleoside
  modified_base 15: mod_base = OTHER; note = 2-O-methyl modified nucleoside
  modified_base 16: mod_base = OTHER; note = 2-O-methyl modified nucleoside
  modified_base 17: mod_base = OTHER; note = 2-O-methyl modified nucleoside
  modified_base 18: mod_base = OTHER; note = 2-O-methyl modified nucleoside
  modified_base 19: mod_base = OTHER; note = 2-O-methyl modified nucleoside
  modified_base 20: mod_base = OTHER; note = 2-O-methyl modified nucleoside
  modified_base 21: mod_base = OTHER; note = 2-O-methyl modified nucleoside
  modified_base 1^2: mod_base = OTHER; note = phosphorothioate linkage
  modified_base 2^3: mod_base = OTHER; note = phosphorothioate linkage
  modified_base 19^20: mod_base = OTHER; note = phosphorothioate linkage
  modified_base 20^21: mod_base = OTHER; note = phosphorothioate linkage
gatgaaagattcggtagtatt

SEQ ID NO: 3655 - RNA, 21 nt, synthetic construct
  source 1..21: mol_type = other RNA
  modified_base 1: mod_base = OTHER; note = 2-O-methyl modified nucleoside; note = GalNAc
  modified_base 6: mod_base = OTHER; note = 2-fluoro-modified nucleoside
  modified_base 7: mod_base = OTHER; note = 2-fluoro-modified nucleoside
  modified_base 9: mod_base = OTHER; note = 2-fluoro-modified nucleoside
  modified_base 2: mod_base = OTHER; note = 2-O-methyl modified nucleoside
  modified_base 3: mod_base = OTHER; note = 2-O-methyl modified nucleoside
  modified_base 4: mod_base = OTHER; note = 2-O-methyl modified nucleoside
  modified_base 5: mod_base = OTHER; note = 2-O-methyl modified nucleoside
  modified_base 8: mod_base = OTHER; note = 2-O-methyl modified nucleoside
  modified_base 10: mod_base = OTHER; note = 2-O-methyl modified nucleoside
  modified_base 11: mod_base = OTHER; note = 2-O-methyl modified nucleoside
  modified_base 12: mod_base = OTHER; note = 2-O-methyl modified nucleoside
  modified_base 13: mod_base = OTHER; note = 2-O-methyl modified nucleoside
  modified_base 14: mod_base = OTHER; note = 2-O-methyl modified nucleoside
  modified_base 15: mod_base = OTHER; note = 2-O-methyl modified nucleoside
  modified_base 16: mod_base = OTHER; note = 2-O-methyl modified nucleoside
  modified_base 17: mod_base = OTHER; note = 2-O-methyl modified nucleoside
  modified_base 18: mod_base = OTHER; note = 2-O-methyl modified nucleoside
  modified_base 19: mod_base = OTHER; note = 2-O-methyl modified nucleoside
  modified_base 20: mod_base = OTHER; note = 2-O-methyl modified nucleoside
  modified_base 21: mod_base = OTHER; note = 2-O-methyl modified nucleoside
  modified_base 1^2: mod_base = OTHER; note = phosphorothioate linkage
  modified_base 2^3: mod_base = OTHER; note = phosphorothioate linkage
  modified_base 19^20: mod_base = OTHER; note = phosphorothioate linkage
  modified_base 20^21: mod_base = OTHER; note = phosphorothioate linkage
agacatcatgagttggtcatt

SEQ ID NO: 3656 - RNA, 21 nt, synthetic construct
  source 1..21: mol_type = other RNA
  modified_base 1: mod_base = OTHER; note = GalNAc; note = 2-O-methyl modified nucleoside
  modified_base 6: mod_base = OTHER; note = 2-fluoro-modified nucleoside
  modified_base 7: mod_base = OTHER; note = 2-fluoro-modified nucleoside
  modified_base 8: mod_base = OTHER; note = 2-fluoro-modified nucleoside
  modified_base 9: mod_base = OTHER; note = 2-fluoro-modified nucleoside
  modified_base 11: mod_base = OTHER; note = 2-fluoro-modified nucleoside
  modified_base 2: mod_base = OTHER; note = 2-O-methyl modified nucleoside
  modified_base 3: mod_base = OTHER; note = 2-O-methyl modified nucleoside
  modified_base 4: mod_base = OTHER; note = 2-O-methyl modified nucleoside
  modified_base 5: mod_base = OTHER; note = 2-O-methyl modified nucleoside
  modified_base 10: mod_base = OTHER; note = 2-O-methyl modified nucleoside
  modified_base 12: mod_base = OTHER; note = 2-O-methyl modified nucleoside
  modified_base 13: mod_base = OTHER; note = 2-O-methyl modified nucleoside
  modified_base 14: mod_base = OTHER; note = 2-O-methyl modified nucleoside
  modified_base 15: mod_base = OTHER; note = 2-O-methyl modified nucleoside
  modified_base 16: mod_base = OTHER; note = 2-O-methyl modified nucleoside
  modified_base 17: mod_base = OTHER; note = 2-O-methyl modified nucleoside
  modified_base 18: mod_base = OTHER; note = 2-O-methyl modified nucleoside
  modified_base 19: mod_base = OTHER; note = 2-O-methyl modified nucleoside
  modified_base 20: mod_base = OTHER; note = 2-O-methyl modified nucleoside
  modified_base 21: mod_base = OTHER; note = 2-O-methyl modified nucleoside
  modified_base 1^2: mod_base = OTHER; note = phosphorothioate linkage
  modified_base 2^3: mod_base = OTHER; note = phosphorothioate linkage
  modified_base 19^20: mod_base = OTHER; note = phosphorothioate linkage
  modified_base 20^21: mod_base = OTHER; note = phosphorothioate linkage
agactggaatggcagaacatt

SEQ ID NO: 3657 - RNA, 21 nt, synthetic construct
  source 1..21: mol_type = other RNA
  modified_base 1: mod_base = OTHER; note = GalNAc; note = 2-O-methyl modified nucleoside
  modified_base 8: mod_base = OTHER; note = 2-fluoro-modified nucleoside
  modified_base 9: mod_base = OTHER; note = 2-fluoro-modified nucleoside
  modified_base 10: mod_base = OTHER; note = 2-fluoro-modified nucleoside
  modified_base 11: mod_base = OTHER; note = 2-fluoro-modified nucleoside
  modified_base 2: mod_base = OTHER; note = 2-O-methyl modified nucleoside
  modified_base 3: mod_base = OTHER; note = 2-O-methyl modified nucleoside
  modified_base 4: mod_base = OTHER; note = 2-O-methyl modified nucleoside
  modified_base 5: mod_base = OTHER; note = 2-O-methyl modified nucleoside
  modified_base 6: mod_base = OTHER; note = 2-O-methyl modified nucleoside
  modified_base 7: mod_base = OTHER; note = 2-O-methyl modified nucleoside
  modified_base 12: mod_base = OTHER; note = 2-O-methyl modified nucleoside
  modified_base 13: mod_base = OTHER; note = 2-O-methyl modified nucleoside
  modified_base 14: mod_base = OTHER; note = 2-O-methyl modified nucleoside
  modified_base 15: mod_base = OTHER; note = 2-O-methyl modified nucleoside
  modified_base 16: mod_base = OTHER; note = 2-O-methyl modified nucleoside
  modified_base 17: mod_base = OTHER; note = 2-O-methyl modified nucleoside
  modified_base 18: mod_base = OTHER; note = 2-O-methyl modified nucleoside
  modified_base 19: mod_base = OTHER; note = 2-O-methyl modified nucleoside
  modified_base 20: mod_base = OTHER; note = 2-O-methyl modified nucleoside
  modified_base 21: mod_base = OTHER; note = 2-O-methyl modified nucleoside
  modified_base 1^2: mod_base = OTHER; note = phosphorothioate linkage
  modified_base 2^3: mod_base = OTHER; note = phosphorothioate linkage
  modified_base 19^20: mod_base = OTHER; note = phosphorothioate linkage
  modified_base 20^21: mod_base = OTHER; note = phosphorothioate linkage
tgacaagtttttcacatcatt

SEQ ID NO: 3658 - RNA, 21 nt, synthetic construct
  source 1..21: mol_type = other RNA
  modified_base 1: mod_base = OTHER; note = 2-O-methyl modified nucleoside; note = GalNAc
  modified_base 8: mod_base = OTHER; note = 2-fluoro-modified nucleoside
  modified_base 9: mod_base = OTHER; note = 2-fluoro-modified nucleoside
  modified_base 10: mod_base = OTHER; note = 2-fluoro-modified nucleoside
  modified_base 11: mod_base = OTHER; note = 2-fluoro-modified nucleoside
  modified_base 2: mod_base = OTHER; note = 2-O-methyl modified nucleoside
  modified_base 3: mod_base = OTHER; note = 2-O-methyl modified nucleoside
  modified_base 4: mod_base = OTHER; note = 2-O-methyl modified nucleoside
  modified_base 5: mod_base = OTHER; note = 2-O-methyl modified nucleoside
  modified_base 6: mod_base = OTHER; note = 2-O-methyl modified nucleoside
  modified_base 7: mod_base = OTHER; note = 2-O-methyl modified nucleoside
  modified_base 12: mod_base = OTHER; note = 2-O-methyl modified nucleoside
  modified_base 13: mod_base = OTHER; note = 2-O-methyl modified nucleoside
  modified_base 14: mod_base = OTHER; note = 2-O-methyl modified nucleoside
  modified_base 15: mod_base = OTHER; note = 2-O-methyl modified nucleoside
  modified_base 16: mod_base = OTHER; note = 2-O-methyl modified nucleoside
  modified_base 17: mod_base = OTHER; note = 2-O-methyl modified nucleoside
  modified_base 18: mod_base = OTHER; note = 2-O-methyl modified nucleoside
  modified_base 19: mod_base = OTHER; note = 2-O-methyl modified nucleoside
  modified_base 20: mod_base = OTHER; note = 2-O-methyl modified nucleoside
  modified_base 21: mod_base = OTHER; note = 2-O-methyl modified nucleoside
  modified_base 1^2: mod_base = OTHER; note = phosphorothioate linkage
  modified_base 2^3: mod_base = OTHER; note = phosphorothioate linkage
  modified_base 19^20: mod_base = OTHER; note = phosphorothioate linkage
  modified_base 20^21: mod_base = OTHER; note = phosphorothioate linkage
tgacaagtttttcacatcatt

SEQ ID NO: 3659 - RNA, 21 nt, synthetic construct
  source 1..21: mol_type = other RNA
  modified_base 1: mod_base = OTHER; note = 2-O-methyl modified nucleoside; note = GalNAc
  modified_base 7: mod_base = OTHER; note = 2-fluoro-modified nucleoside
  modified_base 8: mod_base = OTHER; note = 2-fluoro-modified nucleoside
  modified_base 9: mod_base = OTHER; note = 2-fluoro-modified nucleoside
  modified_base 10: mod_base = OTHER; note = 2-fluoro-modified nucleoside
  modified_base 11: mod_base = OTHER; note = 2-fluoro-modified nucleoside
  modified_base 2: mod_base = OTHER; note = 2-O-methyl modified nucleoside
  modified_base 3: mod_base = OTHER; note = 2-O-methyl modified nucleoside
  modified_base 4: mod_base = OTHER; note = 2-O-methyl modified nucleoside
  modified_base 5: mod_base = OTHER; note = 2-O-methyl modified nucleoside
  modified_base 6: mod_base = OTHER; note = 2-O-methyl modified nucleoside
  modified_base 12: mod_base = OTHER; note = 2-O-methyl modified nucleoside
  modified_base 13: mod_base = OTHER; note = 2-O-methyl modified nucleoside
  modified_base 14: mod_base = OTHER; note = 2-O-methyl modified nucleoside
  modified_base 15: mod_base = OTHER; note = 2-O-methyl modified nucleoside
  modified_base 16: mod_base = OTHER; note = 2-O-methyl modified nucleoside
  modified_base 17: mod_base = OTHER; note = 2-O-methyl modified nucleoside
  modified_base 18: mod_base = OTHER; note = 2-O-methyl modified nucleoside
  modified_base 19: mod_base = OTHER; note = 2-O-methyl modified nucleoside
  modified_base 20: mod_base = OTHER; note = 2-O-methyl modified nucleoside
  modified_base 21: mod_base = OTHER; note = 2-O-methyl modified nucleoside
  modified_base 1^2: mod_base = OTHER; note = phosphorothioate linkage
  modified_base 2^3: mod_base = OTHER; note = phosphorothioate linkage
  modified_base 19^20: mod_base = OTHER; note = phosphorothioate linkage
  modified_base 20^21: mod_base = OTHER; note = phosphorothioate linkage
gacaagtttttcacatccatt

SEQ ID NO: 3660 - RNA, 21 nt, synthetic construct
  source 1..21: mol_type = other RNA
  modified_base 1: mod_base = OTHER; note = 2-O-methyl modified nucleoside; note = GalNAc
  modified_base 5: mod_base = OTHER; note = 2-fluoro-modified nucleoside
  modified_base 6: mod_base = OTHER; note = 2-fluoro-modified nucleoside
  modified_base 8: mod_base = OTHER; note = 2-fluoro-modified nucleoside
  modified_base 9: mod_base = OTHER; note = 2-fluoro-modified nucleoside
  modified_base 11: mod_base = OTHER; note = 2-fluoro-modified nucleoside
  modified_base 2: mod_base = OTHER; note = 2-O-methyl modified nucleoside
  modified_base 3: mod_base = OTHER; note = 2-O-methyl modified nucleoside
  modified_base 4: mod_base = OTHER; note = 2-O-methyl modified nucleoside
  modified_base 7: mod_base = OTHER; note = 2-O-methyl modified nucleoside
  modified_base 10: mod_base = OTHER; note = 2-O-methyl modified nucleoside
  modified_base 12: mod_base = OTHER; note = 2-O-methyl modified nucleoside
  modified_base 13: mod_base = OTHER; note = 2-O-methyl modified nucleoside
  modified_base 14: mod_base = OTHER; note = 2-O-methyl modified nucleoside
  modified_base 15: mod_base = OTHER; note = 2-O-methyl modified nucleoside
  modified_base 16: mod_base = OTHER; note = 2-O-methyl modified nucleoside
  modified_base 17: mod_base = OTHER; note = 2-O-methyl modified nucleoside
  modified_base 18: mod_base = OTHER; note = 2-O-methyl modified nucleoside
  modified_base 19: mod_base = OTHER; note = 2-O-methyl modified nucleoside
  modified_base 20: mod_base = OTHER; note = 2-O-methyl modified nucleoside
  modified_base 21: mod_base = OTHER; note = 2-O-methyl modified nucleoside
  modified_base 1^2: mod_base = OTHER; note = phosphorothioate linkage
  modified_base 2^3: mod_base = OTHER; note = phosphorothioate linkage
  modified_base 19^20: mod_base = OTHER; note = phosphorothioate linkage
  modified_base 20^21: mod_base = OTHER; note = phosphorothioate linkage
gagtttattaccaaggtgatt

SEQ ID NO: 3661 - RNA, 21 nt, synthetic construct
  source 1..21: mol_type = other RNA
  modified_base 1: mod_base = OTHER; note = 2-O-methyl modified nucleoside; note = 2-O-methyl modified nucleoside
  modified_base 5: mod_base = OTHER; note = 2-fluoro-modified nucleoside
  modified_base 7: mod_base = OTHER; note = 2-fluoro-modified nucleoside
  modified_base 8: mod_base = OTHER; note = 2-fluoro-modified nucleoside
  modified_base 9: mod_base = OTHER; note = any deoxynucleotide
  modified_base 2: mod_base = OTHER; note = 2-O-methyl modified nucleoside
  modified_base 3: mod_base = OTHER; note = 2-O-methyl modified nucleoside
  modified_base 4: mod_base = OTHER; note = 2-O-methyl modified nucleoside
  modified_base 6: mod_base = OTHER; note = 2-O-methyl modified nucleoside
  modified_base 10: mod_base = OTHER; note = 2-O-methyl modified nucleoside
  modified_base 11: mod_base = OTHER; note = 2-O-methyl modified nucleoside
  modified_base 12: mod_base = OTHER; note = 2-O-methyl modified nucleoside
  modified_base 13: mod_base = OTHER; note = 2-O-methyl modified nucleoside
  modified_base 14: mod_base = OTHER; note = 2-O-methyl modified nucleoside
  modified_base 15: mod_base = OTHER; note = 2-O-methyl modified nucleoside
  modified_base 16: mod_base = OTHER; note = 2-O-methyl modified nucleoside
  modified_base 17: mod_base = OTHER; note = 2-O-methyl modified nucleoside
  modified_base 18: mod_base = OTHER; note = 2-O-methyl modified nucleoside
  modified_base 19: mod_base = OTHER; note = 2-O-methyl modified nucleoside
  modified_base 20: mod_base = OTHER; note = 2-O-methyl modified nucleoside
  modified_base 21: mod_base = OTHER; note = 2-O-methyl modified nucleoside
  modified_base 1^2: mod_base = OTHER; note = phosphorothioate linkage
  modified_base 2^3: mod_base = OTHER; note = phosphorothioate linkage
  modified_base 19^20: mod_base = OTHER; note = phosphorothioate linkage
  modified_base 20^21: mod_base = OTHER; note = phosphorothioate linkage
taccaaggtggcacttacatt

SEQ ID NO: 3662 - RNA, 21 nt, synthetic construct
  source 1..21: mol_type = other RNA
  modified_base 1: mod_base = OTHER; note = GalNAc; note = 2-O-methyl modified nucleoside
  modified_base 5: mod_base = OTHER; note = 2-fluoro-modified nucleoside
  modified_base 6: mod_base = OTHER; note = 2-fluoro-modified nucleoside
  modified_base 9: mod_base = OTHER; note = 2-fluoro-modified nucleoside
  modified_base 10: mod_base = OTHER; note = 2-fluoro-modified nucleoside
  modified_base 2: mod_base = OTHER; note = 2-O-methyl modified nucleoside
  modified_base 3: mod_base = OTHER; note = 2-O-methyl modified nucleoside
  modified_base 4: mod_base = OTHER; note = 2-O-methyl modified nucleoside
  modified_base 7: mod_base = OTHER; note = 2-O-methyl modified nucleoside
  modified_base 8: mod_base = OTHER; note = 2-O-methyl modified nucleoside
  modified_base 11: mod_base = OTHER; note = 2-O-methyl modified nucleoside
  modified_base 12: mod_base = OTHER; note = 2-O-methyl modified nucleoside
  modified_base 13: mod_base = OTHER; note = 2-O-methyl modified nucleoside
  modified_base 14: mod_base = OTHER; note = 2-O-methyl modified nucleoside
  modified_base 15: mod_base = OTHER; note = 2-O-methyl modified nucleoside
  modified_base 16: mod_base = OTHER; note = 2-O-methyl modified nucleoside
  modified_base 17: mod_base = OTHER; note = 2-O-methyl modified nucleoside
  modified_base 18: mod_base = OTHER; note = 2-O-methyl modified nucleoside
  modified_base 19: mod_base = OTHER; note = 2-O-methyl modified nucleoside
  modified_base 20: mod_base = OTHER; note = 2-O-methyl modified nucleoside
  modified_base 21: mod_base = OTHER; note = 2-O-methyl modified nucleoside
  modified_base 1^2: mod_base = OTHER; note = phosphorothioate linkage
  modified_base 2^3: mod_base = OTHER; note = phosphorothioate linkage
  modified_base 19^20: mod_base = OTHER; note = phosphorothioate linkage
  modified_base 20^21: mod_base = OTHER; note = phosphorothioate linkage
accaaggtggcacttactatt

SEQ ID NO: 3663 - RNA, 21 nt, synthetic construct
  source 1..21: mol_type = other RNA
  modified_base 1: mod_base = OTHER; note = 2-O-methyl modified nucleoside; note = GalNAc
  modified_base 6: mod_base = OTHER; note = 2-fluoro-modified nucleoside
  modified_base 7: mod_base = OTHER; note = 2-fluoro-modified nucleoside
  modified_base 9: mod_base = OTHER; note = 2-fluoro-modified nucleoside
  modified_base 2: mod_base = OTHER; note = 2-O-methyl modified nucleoside
  modified_base 3: mod_base = OTHER; note = 2-O-methyl modified nucleoside
  modified_base 4: mod_base = OTHER; note = 2-O-methyl modified nucleoside
  modified_base 5: mod_base = OTHER; note = 2-O-methyl modified nucleoside
  modified_base 8: mod_base = OTHER; note = 2-O-methyl modified nucleoside
  modified_base 10: mod_base = OTHER; note = 2-O-methyl modified nucleoside
  modified_base 11: mod_base = OTHER; note = 2-O-methyl modified nucleoside
  modified_base 12: mod_base = OTHER; note = 2-O-methyl modified nucleoside
  modified_base 13: mod_base = OTHER; note = 2-O-methyl modified nucleoside
  modified_base 14: mod_base = OTHER; note = 2-O-methyl modified nucleoside
  modified_base 15: mod_base = OTHER; note = 2-O-methyl modified nucleoside
  modified_base 16: mod_base = OTHER; note = 2-O-methyl modified nucleoside
  modified_base 17: mod_base = OTHER; note = 2-O-methyl modified nucleoside
  modified_base 18: mod_base = OTHER; note = 2-O-methyl modified nucleoside
  modified_base 19: mod_base = OTHER; note = 2-O-methyl modified nucleoside
  modified_base 20: mod_base = OTHER; note = 2-O-methyl modified nucleoside
  modified_base 21: mod_base = OTHER; note = 2-O-methyl modified nucleoside
  modified_base 1^2: mod_base = OTHER; note = phosphorothioate linkage
  modified_base 2^3: mod_base = OTHER; note = phosphorothioate linkage
  modified_base 19^20: mod_base = OTHER; note = phosphorothioate linkage
  modified_base 20^21: mod_base = OTHER; note = phosphorothioate linkage
aaggtggcacttactcaaatt

SEQ ID NO: 3664 - RNA, 21 nt, synthetic construct
  source 1..21: mol_type = other RNA
  modified_base 1: mod_base = OTHER; note = GalNAc; note = 2-O-methyl modified nucleoside
  modified_base 7: mod_base = OTHER; note = 2-fluoro-modified nucleoside
  modified_base 9: mod_base = OTHER; note = 2-fluoro-modified nucleoside
  modified_base 10: mod_base = OTHER; note = 2-fluoro-modified nucleoside
  modified_base 2: mod_base = OTHER; note = 2-O-methyl modified nucleoside
  modified_base 3: mod_base = OTHER; note = 2-O-methyl modified nucleoside
  modified_base 4: mod_base = OTHER; note = 2-O-methyl modified nucleoside
  modified_base 5: mod_base = OTHER; note = 2-O-methyl modified nucleoside
  modified_base 6: mod_base = OTHER; note = 2-O-methyl modified nucleoside
  modified_base 8: mod_base = OTHER; note = 2-O-methyl modified nucleoside
  modified_base 11: mod_base = OTHER; note = 2-O-methyl modified nucleoside
  modified_base 12: mod_base = OTHER; note = 2-O-methyl modified nucleoside
  modified_base 13: mod_base = OTHER; note = 2-O-methyl modified nucleoside
  modified_base 14: mod_base = OTHER; note = 2-O-methyl modified nucleoside
  modified_base 15: mod_base = OTHER; note = 2-O-methyl modified nucleoside
  modified_base 16: mod_base = OTHER; note = 2-O-methyl modified nucleoside
  modified_base 17: mod_base = OTHER; note = 2-O-methyl modified nucleoside
  modified_base 18: mod_base = OTHER; note = 2-O-methyl modified nucleoside
  modified_base 19: mod_base = OTHER; note = 2-O-methyl modified nucleoside
  modified_base 20: mod_base = OTHER; note = 2-O-methyl modified nucleoside
  modified_base 21: mod_base = OTHER; note = 2-O-methyl modified nucleoside
  modified_base 1^2: mod_base = OTHER; note = phosphorothioate linkage
  modified_base 2^3: mod_base = OTHER; note = phosphorothioate linkage
  modified_base 19^20: mod_base = OTHER; note = phosphorothioate linkage
  modified_base 20^21: mod_base = OTHER; note = phosphorothioate linkage
aggtggcacttactcaaaatt

SEQ ID NO: 3665 - RNA, 21 nt, synthetic construct
  source 1..21: mol_type = other RNA
  modified_base 1: mod_base = OTHER; note = GalNAc; note = 2-O-methyl modified nucleoside
  modified_base 5: mod_base = OTHER; note = 2-fluoro-modified nucleoside
  modified_base 6: mod_base = OTHER; note = 2-fluoro-modified nucleoside
  modified_base 8: mod_base = OTHER; note = 2-fluoro-modified nucleoside
  modified_base 9: mod_base = OTHER; note = 2-fluoro-modified nucleoside
  modified_base 2: mod_base = OTHER; note = 2-O-methyl modified nucleoside
  modified_base 3: mod_base = OTHER; note = 2-O-methyl modified nucleoside
  modified_base 4: mod_base = OTHER; note = 2-O-methyl modified nucleoside
  modified_base 8: mod_base = OTHER; note = 2-O-methyl modified nucleoside
  modified_base 11: mod_base = OTHER; note = 2-O-methyl modified nucleoside
  modified_base 12: mod_base = OTHER; note = 2-O-methyl modified nucleoside
  modified_base 13: mod_base = OTHER; note = 2-O-methyl modified nucleoside
  modified_base 14: mod_base = OTHER; note = 2-O-methyl modified nucleoside
  modified_base 15: mod_base = OTHER; note = 2-O-methyl modified nucleoside
  modified_base 16: mod_base = OTHER; note = 2-O-methyl modified nucleoside
  modified_base 17: mod_base = OTHER; note = 2-O-methyl modified nucleoside
  modified_base 18: mod_base = OTHER; note = 2-O-methyl modified nucleoside
  modified_base 19: mod_base = OTHER; note = 2-O-methyl modified nucleoside
  modified_base 20: mod_base = OTHER; note = 2-O-methyl modified nucleoside
  modified_base 21: mod_base = OTHER; note = 2-O-methyl modified nucleoside
  modified_base 1^2: mod_base = OTHER; note = phosphorothioate linkage
  modified_base 2^3: mod_base = OTHER; note = phosphorothioate linkage
  modified_base 19^20: mod_base = OTHER; note = phosphorothioate linkage
  modified_base 20^21: mod_base = OTHER; note = phosphorothioate linkage
gatgaaagattcggtagtatt

SEQ ID NO: 3666 - RNA, 21 nt, synthetic construct
  source 1..21: mol_type = other RNA
  modified_base 1: mod_base = OTHER; note = 2-O-methyl modified nucleoside; note = GalNAc
  modified_base 5: mod_base = OTHER; note = 2-fluoro-modified nucleoside
  modified_base 6: mod_base = OTHER; note = 2-fluoro-modified nucleoside
  modified_base 8: mod_base = OTHER; note = 2-fluoro-modified nucleoside
  modified_base 9: mod_base = OTHER; note = 2-fluoro-modified nucleoside
  modified_base 2: mod_base = OTHER; note = 2-O-methyl modified nucleoside
  modified_base 3: mod_base = OTHER; note = 2-O-methyl modified nucleoside
  modified_base 4: mod_base = OTHER; note = 2-O-methyl modified nucleoside
  modified_base 7: mod_base = OTHER; note = 2-O-methyl modified nucleoside
  modified_base 10: mod_base = OTHER; note = 2-O-methyl modified nucleoside
  modified_base 11: mod_base = OTHER; note = 2-O-methyl modified nucleoside
  modified_base 12: mod_base = OTHER; note = 2-O-methyl modified nucleoside
  modified_base 13: mod_base = OTHER; note = 2-O-methyl modified nucleoside
  modified_base 14: mod_base = OTHER; note = 2-O-methyl modified nucleoside
  modified_base 15: mod_base = OTHER; note = 2-O-methyl modified nucleoside
  modified_base 16: mod_base = OTHER; note = 2-O-methyl modified nucleoside
  modified_base 17: mod_base = OTHER; note = 2-O-methyl modified nucleoside
  modified_base 18: mod_base = OTHER; note = 2-O-methyl modified nucleoside
  modified_base 19: mod_base = OTHER; note = 2-O-methyl modified nucleoside
  modified_base 20: mod_base = OTHER; note = 2-O-methyl modified nucleoside
  modified_base 21: mod_base = OTHER; note = 2-O-methyl modified nucleoside
  modified_base 1^2: mod_base = OTHER; note = phosphorothioate linkage
  modified_base 2^3: mod_base = OTHER; note = phosphorothioate linkage
  modified_base 19^20: mod_base = OTHER; note = phosphorothioate linkage
  modified_base 20^21: mod_base = OTHER; note = phosphorothioate linkage
gatgaaagattcggtagtatt

SEQ ID NO: 3667 - RNA, 21 nt, synthetic construct
  source 1..21: mol_type = other RNA
  modified_base 1: mod_base = OTHER; note = 2-O-methyl modified nucleoside; note = GalNAc
  modified_base 5: mod_base = OTHER; note = 2-fluoro-modified nucleoside
  modified_base 6: mod_base = OTHER; note = 2-fluoro-modified nucleoside
  modified_base 8: mod_base = OTHER; note = 2-fluoro-modified nucleoside
  modified_base 9: mod_base = OTHER; note = 2-fluoro-modified nucleoside
  modified_base 2: mod_base = OTHER; note = 2-O-methyl modified nucleoside
  modified_base 3: mod_base = OTHER; note = 2-O-methyl modified nucleoside
  modified_base 4: mod_base = OTHER; note = 2-O-methyl modified nucleoside
  modified_base 7: mod_base = OTHER; note = 2-O-methyl modified nucleoside
  modified_base 10: mod_base = OTHER; note = 2-O-methyl modified nucleoside
  modified_base 11: mod_base = OTHER; note = 2-O-methyl modified nucleoside
  modified_base 12: mod_base = OTHER; note = 2-O-methyl modified nucleoside
  modified_base 13: mod_base = OTHER; note = 2-O-methyl modified nucleoside
  modified_base 14: mod_base = OTHER; note = 2-O-methyl modified nucleoside
  modified_base 15: mod_base = OTHER; note = 2-O-methyl modified nucleoside
  modified_base 16: mod_base = OTHER; note = 2-O-methyl modified nucleoside
  modified_base 17: mod_base = OTHER; note = 2-O-methyl modified nucleoside
  modified_base 18: mod_base = OTHER; note = 2-O-methyl modified nucleoside
  modified_base 19: mod_base = OTHER; note = 2-O-methyl modified nucleoside
  modified_base 20: mod_base = OTHER; note = 2-O-methyl modified nucleoside
  modified_base 21: mod_base = OTHER; note = 2-O-methyl modified nucleoside
  modified_base 1^2: mod_base = OTHER; note = phosphorothioate linkage
  modified_base 2^3: mod_base = OTHER; note = phosphorothioate linkage
  modified_base 19^20: mod_base = OTHER; note = phosphorothioate linkage
  modified_base 20^21: mod_base = OTHER; note = phosphorothioate linkage
gatgaaagattcggtagtatt

SEQ ID NO: 3668 - RNA, 21 nt, synthetic construct
  source 1..21: mol_type = other RNA
  modified_base 1: mod_base = OTHER; note = GalNAc; note = 2-O-methyl modified nucleoside
  modified_base 5: mod_base = OTHER; note = 2-fluoro-modified nucleoside
  modified_base 6: mod_base = OTHER; note = 2-fluoro-modified nucleoside
  modified_base 8: mod_base = OTHER; note = 2-fluoro-modified nucleoside
  modified_base 9: mod_base = OTHER; note = 2-fluoro-modified nucleoside
  modified_base 2: mod_base = OTHER; note = 2-O-methyl modified nucleoside
  modified_base 3: mod_base = OTHER; note = 2-O-methyl modified nucleoside
  modified_base 4: mod_base = OTHER; note = 2-O-methyl modified nucleoside
  modified_base 7: mod_base = OTHER; note = 2-O-methyl modified nucleoside
  modified_base 10: mod_base = OTHER; note = 2-O-methyl modified nucleoside
  modified_base 11: mod_base = OTHER; note = 2-O-methyl modified nucleoside
  modified_base 12: mod_base = OTHER; note = 2-O-methyl modified nucleoside
  modified_base 13: mod_base = OTHER; note = 2-O-methyl modified nucleoside
  modified_base 14: mod_base = OTHER; note = 2-O-methyl modified nucleoside
  modified_base 15: mod_base = OTHER; note = 2-O-methyl modified nucleoside
  modified_base 16: mod_base = OTHER; note = 2-O-methyl modified nucleoside
  modified_base 17: mod_base = OTHER; note = 2-O-methyl modified nucleoside
  modified_base 18: mod_base = OTHER; note = 2-O-methyl modified nucleoside
  modified_base 19: mod_base = OTHER; note = 2-O-methyl modified nucleoside
  modified_base 20: mod_base = OTHER; note = 2-O-methyl modified nucleoside
  modified_base 21: mod_base = OTHER; note = 2-O-methyl modified nucleoside
  modified_base 1^2: mod_base = OTHER; note = phosphorothioate linkage
  modified_base 2^3: mod_base = OTHER; note = phosphorothioate linkage
  modified_base 19^20: mod_base = OTHER; note = phosphorothioate linkage
  modified_base 20^21: mod_base = OTHER; note = phosphorothioate linkage
gatgaaagattcggtagtatt

SEQ ID NO: 3669 - RNA, 21 nt, synthetic construct
  source 1..21: mol_type = other RNA
  modified_base 1: mod_base = OTHER; note = 2-O-methyl modified nucleoside; note = GalNAc
  modified_base 5: mod_base = OTHER; note = 2-fluoro-modified nucleoside
  modified_base 6: mod_base = OTHER; note = 2-fluoro-modified nucleoside
  modified_base 8: mod_base = OTHER; note = 2-fluoro-modified nucleoside
  modified_base 9: mod_base = OTHER; note = 2-fluoro-modified nucleoside
  modified_base 2: mod_base = OTHER; note = 2-O-methyl modified nucleoside
  modified_base 3: mod_base = OTHER; note = 2-O-methyl modified nucleoside
  modified_base 4: mod_base = OTHER; note = 2-O-methyl modified nucleoside
  modified_base 7: mod_base = OTHER; note = 2-O-methyl modified nucleoside
  modified_base 10: mod_base = OTHER; note = 2-O-methyl modified nucleoside
  modified_base 11: mod_base = OTHER; note = 2-O-methyl modified nucleoside
  modified_base 12: mod_base = OTHER; note = 2-O-methyl modified nucleoside
  modified_base 13: mod_base = OTHER; note = 2-O-methyl modified nucleoside
  modified_base 14: mod_base = OTHER; note = 2-O-methyl modified nucleoside
  modified_base 15: mod_base = OTHER; note = 2-O-methyl modified nucleoside
  modified_base 16: mod_base = OTHER; note = 2-O-methyl modified nucleoside
  modified_base 18: mod_base = OTHER; note = 2-O-methyl modified nucleoside
  modified_base 19: mod_base = OTHER; note = 2-O-methyl modified nucleoside
  modified_base 20: mod_base = OTHER; note = 2-O-methyl modified nucleoside
  modified_base 21: mod_base = OTHER; note = 2-O-methyl modified nucleoside
  modified_base 1^2: mod_base = OTHER; note = phosphorothioate linkage
  modified_base 2^3: mod_base = OTHER; note = phosphorothioate linkage
  modified_base 19^20: mod_base = OTHER; note = phosphorothioate linkage
  modified_base 20^21: mod_base = OTHER; note = phosphorothioate linkage
gatgaaagattcggtagtatt

SEQ ID NO: 3670 - RNA, 21 nt, synthetic construct
  source 1..21: mol_type = other RNA
  modified_base 1: mod_base = OTHER; note = GalNAc; note = 2-O-methyl modified nucleoside
  modified_base 8: mod_base = OTHER; note = 2-fluoro-modified nucleoside
  modified_base 9: mod_base = OTHER; note = 2-fluoro-modified nucleoside
  modified_base 11: mod_base = OTHER; note = 2-fluoro-modified nucleoside
  modified_base 2: mod_base = OTHER; note = 2-O-methyl modified nucleoside
  modified_base 3: mod_base = OTHER; note = 2-O-methyl modified nucleoside
  modified_base 4: mod_base = OTHER; note = 2-O-methyl modified nucleoside
  modified_base 7: mod_base = OTHER; note = 2-O-methyl modified nucleoside
  modified_base 10: mod_base = OTHER; note = 2-O-methyl modified nucleoside
  modified_base 12: mod_base = OTHER; note = 2-O-methyl modified nucleoside
  modified_base 13: mod_base = OTHER; note = 2-O-methyl modified nucleoside
  modified_base 15: mod_base = OTHER; note = 2-O-methyl modified nucleoside
  modified_base 14: mod_base = OTHER; note = 2-O-methyl modified nucleoside
  modified_base 16: mod_base = OTHER; note = 2-O-methyl modified nucleoside
  modified_base 17: mod_base = OTHER; note = 2-O-methyl modified nucleoside
  modified_base 18: mod_base = OTHER; note = 2-O-methyl modified nucleoside
  modified_base 19: mod_base = OTHER; note = 2-O-methyl modified nucleoside
  modified_base 20: mod_base = OTHER; note = 2-O-methyl modified nucleoside
  modified_base 21: mod_base = OTHER; note = 2-O-methyl modified nucleoside
  modified_base 5: mod_base = OTHER; note = 2-O-methyl modified nucleoside
  modified_base 6: mod_base = OTHER; note = 2-O-methyl modified nucleoside
  modified_base 1^2: mod_base = OTHER; note = phosphorothioate linkage
  modified_base 2^3: mod_base = OTHER; note = phosphorothioate linkage
  modified_base 19^20: mod_base = OTHER; note = phosphorothioate linkage
  modified_base 20^21: mod_base = OTHER; note = phosphorothioate linkage
tgacaagtttttcacatcatt

SEQ ID NO: 3671 - RNA, 21 nt, synthetic construct
  source 1..21: mol_type = other RNA
  modified_base 1: mod_base = OTHER; note = 2-O-methyl modified nucleoside; note = GalNAc
  modified_base 9: mod_base = OTHER; note = 2-fluoro-modified nucleoside
  modified_base 11: mod_base = OTHER; note = 2-fluoro-modified nucleoside
  modified_base 13: mod_base = OTHER; note = 2-fluoro-modified nucleoside
  modified_base 2: mod_base = OTHER; note = 2-O-methyl modified nucleoside
  modified_base 3: mod_base = OTHER; note = 2-O-methyl modified nucleoside
  modified_base 4: mod_base = OTHER; note = 2-O-methyl modified nucleoside
  modified_base 5: mod_base = OTHER; note = 2-O-methyl modified nucleoside
  modified_base 6: mod_base = OTHER; note = 2-O-methyl modified nucleoside
  modified_base 8: mod_base = OTHER; note = 2-O-methyl modified nucleoside
  modified_base 10: mod_base = OTHER; note = 2-O-methyl modified nucleoside
  modified_base 12: mod_base = OTHER; note = 2-O-methyl modified nucleoside
  modified_base 14: mod_base = OTHER; note = 2-O-methyl modified nucleoside
  modified_base 15: mod_base = OTHER; note = 2-O-methyl modified nucleoside
  modified_base 16: mod_base = OTHER; note = 2-O-methyl modified nucleoside
  modified_base 17: mod_base = OTHER; note = 2-O-methyl modified nucleoside
  modified_base 18: mod_base = OTHER; note = 2-O-methyl modified nucleoside
  modified_base 19: mod_base = OTHER; note = 2-O-methyl modified nucleoside
  modified_base 20: mod_base = OTHER; note = 2-O-methyl modified nucleoside
  modified_base 21: mod_base = OTHER; note = 2-O-methyl modified nucleoside
  modified_base 1^2: mod_base = OTHER; note = phosphorothioate linkage
  modified_base 2^3: mod_base = OTHER; note = phosphorothioate linkage
  modified_base 19^20: mod_base = OTHER; note = phosphorothioate linkage
  modified_base 20^21: mod_base = OTHER; note = phosphorothioate linkage
tgacaagtttttcacatcatt

SEQ ID NO: 3672 - RNA, 21 nt, synthetic construct
  source 1..21: mol_type = other RNA
  modified_base 1: mod_base = OTHER; note = 2-O-methyl modified nucleoside; note = GalNAc
  modified_base 8: mod_base = OTHER; note = 2-fluoro-modified nucleoside
  modified_base 9: mod_base = OTHER; note = 2-fluoro-modified nucleoside
  modified_base 10: mod_base = OTHER; note = 2-fluoro-modified nucleoside
  modified_base 11: mod_base = OTHER; note = 2-fluoro-modified nucleoside
  modified_base 2: mod_base = OTHER; note = 2-O-methyl modified nucleoside
  modified_base 3: mod_base = OTHER; note = 2-O-methyl modified nucleoside
  modified_base 4: mod_base = OTHER; note = 2-O-methyl modified nucleoside
  modified_base 5: mod_base = OTHER; note = 2-O-methyl modified nucleoside
  modified_base 6: mod_base = OTHER; note = 2-O-methyl modified nucleoside
  modified_base 7: mod_base = OTHER; note = 2-O-methyl modified nucleoside
  modified_base 12: mod_base = OTHER; note = 2-O-methyl modified nucleoside
  modified_base 13: mod_base = OTHER; note = 2-O-methyl modified nucleoside
  modified_base 14: mod_base = OTHER; note = 2-O-methyl modified nucleoside
  modified_base 15: mod_base = OTHER; note = 2-O-methyl modified nucleoside
  modified_base 16: mod_base = OTHER; note = 2-O-methyl modified nucleoside
  modified_base 17: mod_base = OTHER; note = 2-O-methyl modified nucleoside
  modified_base 18: mod_base = OTHER; note = 2-O-methyl modified nucleoside
  modified_base 19: mod_base = OTHER; note = 2-O-methyl modified nucleoside
  modified_base 20: mod_base = OTHER; note = 2-O-methyl modified nucleoside
  modified_base 21: mod_base = OTHER; note = 2-O-methyl modified nucleoside
  modified_base 1^2: mod_base = OTHER; note = phosphorothioate linkage
  modified_base 2^3: mod_base = OTHER; note = phosphorothioate linkage
  modified_base 19^20: mod_base = OTHER; note = phosphorothioate linkage
  modified_base 20^21: mod_base = OTHER; note = phosphorothioate linkage
tgacaagtttttcacatcatt

SEQ ID NO: 3673 - RNA, 21 nt, synthetic construct
  source 1..21: mol_type = other RNA
  modified_base 1: mod_base = OTHER; note = GalNAc; note = 2-O-methyl modified nucleoside
  modified_base 8: mod_base = OTHER; note = 2-fluoro-modified nucleoside
  modified_base 9: mod_base = OTHER; note = 2-fluoro-modified nucleoside
  modified_base 10: mod_base = OTHER; note = 2-fluoro-modified nucleoside
  modified_base 11: mod_base = OTHER; note = 2-fluoro-modified nucleoside
  modified_base 2: mod_base = OTHER; note = 2-O-methyl modified nucleoside
  modified_base 3: mod_base = OTHER; note = 2-O-methyl modified nucleoside
  modified_base 4: mod_base = OTHER; note = 2-O-methyl modified nucleoside
  modified_base 5: mod_base = OTHER; note = 2-O-methyl modified nucleoside
  modified_base 6: mod_base = OTHER; note = 2-O-methyl modified nucleoside
  modified_base 7: mod_base = OTHER; note = 2-O-methyl modified nucleoside
  modified_base 12: mod_base = OTHER; note = 2-O-methyl modified nucleoside
  modified_base 13: mod_base = OTHER; note = 2-O-methyl modified nucleoside
  modified_base 14: mod_base = OTHER; note = 2-O-methyl modified nucleoside
  modified_base 15: mod_base = OTHER; note = 2-O-methyl modified nucleoside
  modified_base 16: mod_base = OTHER; note = 2-O-methyl modified nucleoside
  modified_base 17: mod_base = OTHER; note = 2-O-methyl modified nucleoside
  modified_base 18: mod_base = OTHER; note = 2-O-methyl modified nucleoside
  modified_base 19: mod_base = OTHER; note = 2-O-methyl modified nucleoside
  modified_base 20: mod_base = OTHER; note = 2-O-methyl modified nucleoside
  modified_base 21: mod_base = OTHER; note = 2-O-methyl modified nucleoside
  modified_base 1^2: mod_base = OTHER; note = phosphorothioate linkage
  modified_base 2^3: mod_base = OTHER; note = phosphorothioate linkage
  modified_base 19^20: mod_base = OTHER; note = phosphorothioate linkage
  modified_base 20^21: mod_base = OTHER; note = phosphorothioate linkage
tgacaagtttttcacatcatt

SEQ ID NO: 3674 - RNA, 21 nt, synthetic construct
  source 1..21: mol_type = other RNA
  modified_base 1: mod_base = OTHER; note = 2-O-methyl modified nucleoside; note = GalNAc
  modified_base 8: mod_base = OTHER; note = 2-fluoro-modified nucleoside
  modified_base 9: mod_base = OTHER; note = 2-fluoro-modified nucleoside
  modified_base 10: mod_base = OTHER; note = 2-fluoro-modified nucleoside
  modified_base 11: mod_base = OTHER; note = 2-fluoro-modified nucleoside
  modified_base 2: mod_base = OTHER; note = 2-O-methyl modified nucleoside
  modified_base 3: mod_base = OTHER; note = 2-O-methyl modified nucleoside
  modified_base 4: mod_base = OTHER; note = 2-O-methyl modified nucleoside
  modified_base 5: mod_base = OTHER; note = 2-O-methyl modified nucleoside
  modified_base 6: mod_base = OTHER; note = 2-O-methyl modified nucleoside
  modified_base 7: mod_base = OTHER; note = 2-O-methyl modified nucleoside
  modified_base 12: mod_base = OTHER; note = 2-O-methyl modified nucleoside
  modified_base 13: mod_base = OTHER; note = 2-O-methyl modified nucleoside
  modified_base 14: mod_base = OTHER; note = 2-O-methyl modified nucleoside
  modified_base 15: mod_base = OTHER; note = 2-O-methyl modified nucleoside
  modified_base 16: mod_base = OTHER; note = 2-O-methyl modified nucleoside
  modified_base 17: mod_base = OTHER; note = 2-O-methyl modified nucleoside
  modified_base 18: mod_base = OTHER; note = 2-O-methyl modified nucleoside
  modified_base 19: mod_base = OTHER; note = 2-O-methyl modified nucleoside
  modified_base 20: mod_base = OTHER; note = 2-O-methyl modified nucleoside
  modified_base 21: mod_base = OTHER; note = 2-O-methyl modified nucleoside
  modified_base 1^2: mod_base = OTHER; note = phosphorothioate linkage
  modified_base 2^3: mod_base = OTHER; note = phosphorothioate linkage
  modified_base 19^20: mod_base = OTHER; note = phosphorothioate linkage
  modified_base 20^21: mod_base = OTHER; note = phosphorothioate linkage
tgacaagtttttcacatcatt

SEQ ID NO: 3675 - RNA, 21 nt, synthetic construct
  source 1..21: mol_type = other RNA
  modified_base 1: mod_base = OTHER; note = GalNAc; note = 2-O-methyl modified nucleoside
  modified_base 8: mod_base = OTHER; note = 2-fluoro-modified nucleoside
  modified_base 9: mod_base = OTHER; note = 2-fluoro-modified nucleoside
  modified_base 10: mod_base = OTHER; note = 2-fluoro-modified nucleoside
  modified_base 11: mod_base = OTHER; note = 2-fluoro-modified nucleoside
  modified_base 2: mod_base = OTHER; note = 2-O-methyl modified nucleoside
  modified_base 4: mod_base = OTHER; note = 2-O-methyl modified nucleoside
  modified_base 6: mod_base = OTHER; note = 2-O-methyl modified nucleoside
  modified_base 3: mod_base = OTHER; note = 2-O-methyl modified nucleoside
  modified_base 5: mod_base = OTHER; note = 2-O-methyl modified nucleoside
  modified_base 7: mod_base = OTHER; note = 2-O-methyl modified nucleoside
  modified_base 12: mod_base = OTHER; note = 2-O-methyl modified nucleoside
  modified_base 13: mod_base = OTHER; note = 2-O-methyl modified nucleoside
  modified_base 14: mod_base = OTHER; note = 2-O-methyl modified nucleoside
  modified_base 15: mod_base = OTHER; note = 2-O-methyl modified nucleoside
  modified_base 16: mod_base = OTHER; note = 2-O-methyl modified nucleoside
  modified_base 17: mod_base = OTHER; note = 2-O-methyl modified nucleoside
  modified_base 18: mod_base = OTHER; note = 2-O-methyl modified nucleoside
  modified_base 19: mod_base = OTHER; note = 2-O-methyl modified nucleoside
  modified_base 20: mod_base = OTHER; note = 2-O-methyl modified nucleoside
  modified_base 21: mod_base = OTHER; note = 2-O-methyl modified nucleoside
  modified_base 1^2: mod_base = OTHER; note = phosphorothioate linkage
  modified_base 2^3: mod_base = OTHER; note = phosphorothioate linkage
  modified_base 19^20: mod_base = OTHER; note = phosphorothioate linkage
  modified_base 20^21: mod_base = OTHER; note = phosphorothioate linkage
tgacaagtttttcacatcatt

SEQ ID NO: 3676 - RNA, 21 nt, synthetic construct
  source 1..21: mol_type = other RNA
  modified_base 1: mod_base = OTHER; note = 2-O-methyl modified nucleoside; note = GalNAc
  modified_base 8: mod_base = OTHER; note = 2-fluoro-modified nucleoside
  modified_base 9: mod_base = OTHER; note = 2-fluoro-modified nucleoside
  modified_base 10: mod_base = OTHER; note = 2-fluoro-modified nucleoside
  modified_base 11: mod_base = OTHER; note = 2-fluoro-modified nucleoside
  modified_base 2: mod_base = OTHER; note = 2-O-methyl modified nucleoside
  modified_base 3: mod_base = OTHER; note = 2-O-methyl modified nucleoside
  modified_base 4: mod_base = OTHER; note = 2-O-methyl modified nucleoside
  modified_base 5: mod_base = OTHER; note = 2-O-methyl modified nucleoside
  modified_base 6: mod_base = OTHER; note = 2-O-methyl modified nucleoside
  modified_base 7: mod_base = OTHER; note = 2-O-methyl modified nucleoside
  modified_base 12: mod_base = OTHER; note = 2-O-methyl modified nucleoside
  modified_base 13: mod_base = OTHER; note = 2-O-methyl modified nucleoside
  modified_base 14: mod_base = OTHER; note = 2-O-methyl modified nucleoside
  modified_base 15: mod_base = OTHER; note = 2-O-methyl modified nucleoside
  modified_base 16: mod_base = OTHER; note = 2-O-methyl modified nucleoside
  modified_base 17: mod_base = OTHER; note = 2-O-methyl modified nucleoside
  modified_base 18: mod_base = OTHER; note = 2-O-methyl modified nucleoside
  modified_base 19: mod_base = OTHER; note = 2-O-methyl modified nucleoside
  modified_base 20: mod_base = OTHER; note = 2-O-methyl modified nucleoside
  modified_base 21: mod_base = OTHER; note = 2-O-methyl modified nucleoside
  modified_base 1^2: mod_base = OTHER; note = phosphorothioate linkage
  modified_base 2^3: mod_base = OTHER; note = phosphorothioate linkage
  modified_base 19^20: mod_base = OTHER; note = phosphorothioate linkage
  modified_base 20^21: mod_base = OTHER; note = phosphorothioate linkage
tgacaagtttttcacatcatt

SEQ ID NO: 3677 - RNA, 21 nt, synthetic construct
  source 1..21: mol_type = other RNA
  modified_base 1^2: mod_base = OTHER; note = phosphorothioate linkage
  modified_base 2^3: mod_base = OTHER; note = phosphorothioate linkage
  modified_base 19^20: mod_base = OTHER; note = phosphorothioate linkage
  modified_base 20^21: mod_base = OTHER; note = phosphorothioate linkage
  modified_base 2: mod_base = OTHER; note = 2-fluoro-modified nucleoside
  modified_base 4: mod_base = OTHER; note = 2-fluoro-modified nucleoside
  modified_base 6: mod_base = OTHER; note = 2-fluoro-modified nucleoside
  modified_base 8: mod_base = OTHER; note = 2-fluoro-modified nucleoside
  modified_base 10: mod_base = OTHER; note = 2-fluoro-modified nucleoside
  modified_base 12: mod_base = OTHER; note = 2-fluoro-modified nucleoside
  modified_base 14: mod_base = OTHER; note = 2-fluoro-modified nucleoside
  modified_base 16: mod_base = OTHER; note = 2-fluoro-modified nucleoside
  modified_base 18: mod_base = OTHER; note = 2-fluoro-modified nucleoside
  modified_base 1: mod_base = OTHER; note = 2-O-methyl modified nucleoside
  modified_base 3: mod_base = OTHER; note = 2-O-methyl modified nucleoside
  modified_base 5: mod_base = OTHER; note = 2-O-methyl modified nucleoside
  modified_base 7: mod_base = OTHER; note = 2-O-methyl modified nucleoside
  modified_base 9: mod_base = OTHER; note = 2-O-methyl modified nucleoside
  modified_base 11: mod_base = OTHER; note = 2-O-methyl modified nucleoside
  modified_base 13: mod_base = OTHER; note = 2-O-methyl modified nucleoside
  modified_base 15: mod_base = OTHER; note = 2-O-methyl modified nucleoside
  modified_base 17: mod_base = OTHER; note = 2-O-methyl modified nucleoside
  modified_base 19: mod_base = OTHER; note = 2-O-methyl modified nucleoside
  modified_base 20: mod_base = OTHER; note = 2-O-methyl modified nucleoside
  modified_base 21: mod_base = OTHER; note = 2-O-methyl modified nucleoside
tactaccgaatctttcatctt

SEQ ID NO: 3678 - RNA, 21 nt, synthetic construct
  source 1..21: mol_type = other RNA
  modified_base 1^2: mod_base = OTHER; note = phosphorothioate linkage
  modified_base 2^3: mod_base = OTHER; note = phosphorothioate linkage
  modified_base 19^20: mod_base = OTHER; note = phosphorothioate linkage
  modified_base 20^21: mod_base = OTHER; note = phosphorothioate linkage
  modified_base 2: mod_base = OTHER; note = 2-fluoro-modified nucleoside
  modified_base 4: mod_base = OTHER; note = 2-fluoro-modified nucleoside
  modified_base 6: mod_base = OTHER; note = 2-fluoro-modified nucleoside
  modified_base 8: mod_base = OTHER; note = 2-fluoro-modified nucleoside
  modified_base 10: mod_base = OTHER; note = 2-fluoro-modified nucleoside
  modified_base 12: mod_base = OTHER; note = 2-fluoro-modified nucleoside
  modified_base 14: mod_base = OTHER; note = 2-fluoro-modified nucleoside
  modified_base 16: mod_base = OTHER; note = 2-fluoro-modified nucleoside
  modified_base 18: mod_base = OTHER; note = 2-fluoro-modified nucleoside
  modified_base 1: mod_base = OTHER; note = 2-O-methyl modified nucleoside
  modified_base 3: mod_base = OTHER; note = 2-O-methyl modified nucleoside
  modified_base 5: mod_base = OTHER; note = 2-O-methyl modified nucleoside
  modified_base 7: mod_base = OTHER; note = 2-O-methyl modified nucleoside
  modified_base 9: mod_base = OTHER; note = 2-O-methyl modified nucleoside
  modified_base 11: mod_base = OTHER; note = 2-O-methyl modified nucleoside
  modified_base 13: mod_base = OTHER; note = 2-O-methyl modified nucleoside
  modified_base 15: mod_base = OTHER; note = 2-O-methyl modified nucleoside
  modified_base 17: mod_base = OTHER; note = 2-O-methyl modified nucleoside
  modified_base 19: mod_base = OTHER; note = 2-O-methyl modified nucleoside
  modified_base 20: mod_base = OTHER; note = 2-O-methyl modified nucleoside
  modified_base 21: mod_base = OTHER; note = 2-O-methyl modified nucleoside
tcttatcaaatgaatcttctt

SEQ ID NO: 3679 - RNA, 21 nt, synthetic construct
  source 1..21: mol_type = other RNA
  modified_base 1^2: mod_base = OTHER; note = phosphorothioate linkage
  modified_base 2^3: mod_base = OTHER; note = phosphorothioate linkage
  modified_base 19^20: mod_base = OTHER; note = phosphorothioate linkage
  modified_base 20^21: mod_base = OTHER; note = phosphorothioate linkage
  modified_base 2: mod_base = OTHER; note = 2-fluoro-modified nucleoside
  modified_base 4: mod_base = OTHER; note = 2-fluoro-modified nucleoside
  modified_base 6: mod_base = OTHER; note = 2-fluoro-modified nucleoside
  modified_base 8: mod_base = OTHER; note = 2-fluoro-modified nucleoside
  modified_base 10: mod_base = OTHER; note = 2-fluoro-modified nucleoside
  modified_base 12: mod_base = OTHER; note = 2-fluoro-modified nucleoside
  modified_base 14: mod_base = OTHER; note = 2-fluoro-modified nucleoside
  modified_base 16: mod_base = OTHER; note = 2-fluoro-modified nucleoside
  modified_base 18: mod_base = OTHER; note = 2-fluoro-modified nucleoside
  modified_base 1: mod_base = OTHER; note = 2-O-methyl modified nucleoside
  modified_base 3: mod_base = OTHER; note = 2-O-methyl modified nucleoside
  modified_base 5: mod_base = OTHER; note = 2-O-methyl modified nucleoside
  modified_base 7: mod_base = OTHER; note = 2-O-methyl modified nucleoside
  modified_base 9: mod_base = OTHER; note = 2-O-methyl modified nucleoside
  modified_base 11: mod_base = OTHER; note = 2-O-methyl modified nucleoside
  modified_base 13: mod_base = OTHER; note = 2-O-methyl modified nucleoside
  modified_base 15: mod_base = OTHER; note = 2-O-methyl modified nucleoside
  modified_base 17: mod_base = OTHER; note = 2-O-methyl modified nucleoside
  modified_base 19: mod_base = OTHER; note = 2-O-methyl modified nucleoside
  modified_base 20: mod_base = OTHER; note = 2-O-methyl modified nucleoside
  modified_base 21: mod_base = OTHER; note = 2-O-methyl modified nucleoside
tactaccgaatctttcatctt

SEQ ID NO: 3680 - RNA, 21 nt, synthetic construct
  source 1..21: mol_type = other RNA
  modified_base 1^2: mod_base = OTHER; note = phosphorothioate linkage
  modified_base 2^3: mod_base = OTHER; note = phosphorothioate linkage
  modified_base 19^20: mod_base = OTHER; note = phosphorothioate linkage
  modified_base 20^21: mod_base = OTHER; note = phosphorothioate linkage
  modified_base 2: mod_base = OTHER; note = 2-fluoro-modified nucleoside
  modified_base 4: mod_base = OTHER; note = 2-fluoro-modified nucleoside
  modified_base 6: mod_base = OTHER; note = 2-fluoro-modified nucleoside
  modified_base 8: mod_base = OTHER; note = 2-fluoro-modified nucleoside
  modified_base 10: mod_base = OTHER; note = 2-fluoro-modified nucleoside
  modified_base 12: mod_base = OTHER; note = 2-fluoro-modified nucleoside
  modified_base 14: mod_base = OTHER; note = 2-fluoro-modified nucleoside
  modified_base 16: mod_base = OTHER; note = 2-fluoro-modified nucleoside
  modified_base 18: mod_base = OTHER; note = 2-fluoro-modified nucleoside
  modified_base 1: mod_base = OTHER; note = 2-O-methyl modified nucleoside
  modified_base 3: mod_base = OTHER; note = 2-O-methyl modified nucleoside
  modified_base 5: mod_base = OTHER; note = 2-O-methyl modified nucleoside
  modified_base 7: mod_base = OTHER; note = 2-O-methyl modified nucleoside
  modified_base 9: mod_base = OTHER; note = 2-O-methyl modified nucleoside
  modified_base 11: mod_base = OTHER; note = 2-O-methyl modified nucleoside
  modified_base 13: mod_base = OTHER; note = 2-O-methyl modified nucleoside
  modified_base 15: mod_base = OTHER; note = 2-O-methyl modified nucleoside
  modified_base 17: mod_base = OTHER; note = 2-O-methyl modified nucleoside
  modified_base 19: mod_base = OTHER; note = 2-O-methyl modified nucleoside
  modified_base 20: mod_base = OTHER; note = 2-O-methyl modified nucleoside
  modified_base 21: mod_base = OTHER; note = 2-O-methyl modified nucleoside
tactaccgaatctttcatctt

SEQ ID NO: 3681 - RNA, 21 nt, synthetic construct
  source 1..21: mol_type = other RNA
  modified_base 1^2: mod_base = OTHER; note = phosphorothioate linkage
  modified_base 2^3: mod_base = OTHER; note = phosphorothioate linkage
  modified_base 19^20: mod_base = OTHER; note = phosphorothioate linkage
  modified_base 20^21: mod_base = OTHER; note = phosphorothioate linkage
  modified_base 2: mod_base = OTHER; note = 2-fluoro-modified nucleoside
  modified_base 4: mod_base = OTHER; note = 2-fluoro-modified nucleoside
  modified_base 6: mod_base = OTHER; note = 2-fluoro-modified nucleoside
  modified_base 8: mod_base = OTHER; note = 2-fluoro-modified nucleoside
  modified_base 10: mod_base = OTHER; note = 2-fluoro-modified nucleoside
  modified_base 12: mod_base = OTHER; note = 2-fluoro-modified nucleoside
  modified_base 14: mod_base = OTHER; note = 2-fluoro-modified nucleoside
  modified_base 16: mod_base = OTHER; note = 2-fluoro-modified nucleoside
  modified_base 18: mod_base = OTHER; note = 2-fluoro-modified nucleoside
  modified_base 1: mod_base = OTHER; note = 2-O-methyl modified nucleoside
  modified_base 3: mod_base = OTHER; note = 2-O-methyl modified nucleoside
  modified_base 5: mod_base = OTHER; note = 2-O-methyl modified nucleoside
  modified_base 7: mod_base = OTHER; note = 2-O-methyl modified nucleoside
  modified_base 9: mod_base = OTHER; note = 2-O-methyl modified nucleoside
  modified_base 11: mod_base = OTHER; note = 2-O-methyl modified nucleoside
  modified_base 13: mod_base = OTHER; note = 2-O-methyl modified nucleoside
  modified_base 15: mod_base = OTHER; note = 2-O-methyl modified nucleoside
  modified_base 17: mod_base = OTHER; note = 2-O-methyl modified nucleoside
  modified_base 19: mod_base = OTHER; note = 2-O-methyl modified nucleoside
  modified_base 20: mod_base = OTHER; note = 2-O-methyl modified nucleoside
  modified_base 21: mod_base = OTHER; note = 2-O-methyl modified nucleoside
tcttatcaaatgaatcttctt

SEQ ID NO: 3682 - RNA, 21 nt, synthetic construct
  source 1..21: mol_type = other RNA
  modified_base 1^2: mod_base = OTHER; note = phosphorothioate linkage
  modified_base 2^3: mod_base = OTHER; note = phosphorothioate linkage
  modified_base 19^20: mod_base = OTHER; note = phosphorothioate linkage
  modified_base 20^21: mod_base = OTHER; note = phosphorothioate linkage
  modified_base 2: mod_base = OTHER; note = 2-fluoro-modified nucleoside
  modified_base 4: mod_base = OTHER; note = 2-fluoro-modified nucleoside
  modified_base 6: mod_base = OTHER; note = 2-fluoro-modified nucleoside
  modified_base 8: mod_base = OTHER; note = 2-fluoro-modified nucleoside
  modified_base 10: mod_base = OTHER; note = 2-fluoro-modified nucleoside
  modified_base 12: mod_base = OTHER; note = 2-fluoro-modified nucleoside
  modified_base 14: mod_base = OTHER; note = 2-fluoro-modified nucleoside
  modified_base 16: mod_base = OTHER; note = 2-fluoro-modified nucleoside
  modified_base 18: mod_base = OTHER; note = 2-fluoro-modified nucleoside
  modified_base 1: mod_base = OTHER; note = 2-O-methyl modified nucleoside
  modified_base 3: mod_base = OTHER; note = 2-O-methyl modified nucleoside
  modified_base 5: mod_base = OTHER; note = 2-O-methyl modified nucleoside
  modified_base 7: mod_base = OTHER; note = 2-O-methyl modified nucleoside
  modified_base 9: mod_base = OTHER; note = 2-O-methyl modified nucleoside
  modified_base 11: mod_base = OTHER; note = 2-O-methyl modified nucleoside
  modified_base 13: mod_base = OTHER; note = 2-O-methyl modified nucleoside
  modified_base 15: mod_base = OTHER; note = 2-O-methyl modified nucleoside
  modified_base 17: mod_base = OTHER; note = 2-O-methyl modified nucleoside
  modified_base 19: mod_base = OTHER; note = 2-O-methyl modified nucleoside
  modified_base 20: mod_base = OTHER; note = 2-O-methyl modified nucleoside
  modified_base 21: mod_base = OTHER; note = 2-O-methyl modified nucleoside
tcttatcaaatgaatcttctt

SEQ ID NO: 3683 - RNA, 21 nt, synthetic construct
  source 1..21: mol_type = other RNA
  modified_base 1^2: mod_base = OTHER; note = phosphorothioate linkage
  modified_base 2^3: mod_base = OTHER; note = phosphorothioate linkage
  modified_base 19^20: mod_base = OTHER; note = phosphorothioate linkage
  modified_base 20^21: mod_base = OTHER; note = phosphorothioate linkage
  modified_base 2: mod_base = OTHER; note = 2-fluoro-modified nucleoside
  modified_base 4: mod_base = OTHER; note = 2-fluoro-modified nucleoside
  modified_base 6: mod_base = OTHER; note = 2-fluoro-modified nucleoside
  modified_base 8: mod_base = OTHER; note = 2-fluoro-modified nucleoside
  modified_base 10: mod_base = OTHER; note = 2-fluoro-modified nucleoside
  modified_base 12: mod_base = OTHER; note = 2-fluoro-modified nucleoside
  modified_base 14: mod_base = OTHER; note = 2-fluoro-modified nucleoside
  modified_base 16: mod_base = OTHER; note = 2-fluoro-modified nucleoside
  modified_base 18: mod_base = OTHER; note = 2-fluoro-modified nucleoside
  modified_base 1: mod_base = OTHER; note = 2-O-methyl modified nucleoside
  modified_base 3: mod_base = OTHER; note = 2-O-methyl modified nucleoside
  modified_base 5: mod_base = OTHER; note = 2-O-methyl modified nucleoside
  modified_base 9: mod_base = OTHER; note = 2-O-methyl modified nucleoside
  modified_base 7: mod_base = OTHER; note = 2-O-methyl modified nucleoside
  modified_base 11: mod_base = OTHER; note = 2-O-methyl modified nucleoside
  modified_base 13: mod_base = OTHER; note = 2-O-methyl modified nucleoside
  modified_base 15: mod_base = OTHER; note = 2-O-methyl modified nucleoside
  modified_base 17: mod_base = OTHER; note = 2-O-methyl modified nucleoside
  modified_base 19: mod_base = OTHER; note = 2-O-methyl modified nucleoside
  modified_base 20: mod_base = OTHER; note = 2-O-methyl modified nucleoside
  modified_base 21: mod_base = OTHER; note = 2-O-methyl modified nucleoside
tgtaataaactccattgagtt

SEQ ID NO: 3684 - RNA, 21 nt, synthetic construct
  source 1..21: mol_type = other RNA
  modified_base 1^2: mod_base = OTHER; note = phosphorothioate linkage
  modified_base 2^3: mod_base = OTHER; note = phosphorothioate linkage
  modified_base 19^20: mod_base = OTHER; note = phosphorothioate linkage
  modified_base 20^21: mod_base = OTHER; note = phosphorothioate linkage
  modified_base 2: mod_base = OTHER; note = 2-fluoro-modified nucleoside
  modified_base 4: mod_base = OTHER; note = 2-fluoro-modified nucleoside
  modified_base 6: mod_base = OTHER; note = 2-fluoro-modified nucleoside
  modified_base 8: mod_base = OTHER; note = 2-fluoro-modified nucleoside
  modified_base 10: mod_base = OTHER; note = 2-fluoro-modified nucleoside
  modified_base 12: mod_base = OTHER; note = 2-fluoro-modified nucleoside
  modified_base 14: mod_base = OTHER; note = 2-fluoro-modified nucleoside
  modified_base 16: mod_base = OTHER; note = 2-fluoro-modified nucleoside
  modified_base 18: mod_base = OTHER; note = 2-fluoro-modified nucleoside
  modified_base 1: mod_base = OTHER; note = 2-O-methyl modified nucleoside
  modified_base 3: mod_base = OTHER; note = 2-O-methyl modified nucleoside
  modified_base 5: mod_base = OTHER; note = 2-O-methyl modified nucleoside
  modified_base 7: mod_base = OTHER; note = 2-O-methyl modified nucleoside
  modified_base 9: mod_base = OTHER; note = 2-O-methyl modified nucleoside
  modified_base 11: mod_base = OTHER; note = 2-O-methyl modified nucleoside
  modified_base 13: mod_base = OTHER; note = 2-O-methyl modified nucleoside
  modified_base 15: mod_base = OTHER; note = 2-O-methyl modified nucleoside
  modified_base 17: mod_base = OTHER; note = 2-O-methyl modified nucleoside
  modified_base 19: mod_base = OTHER; note = 2-O-methyl modified nucleoside
  modified_base 20: mod_base = OTHER; note = 2-O-methyl modified nucleoside
  modified_base 21: mod_base = OTHER; note = 2-O-methyl modified nucleoside
tggtaataaactccattgatt

SEQ ID NO: 3685 - RNA, 21 nt, synthetic construct
  source 1..21: mol_type = other RNA
  modified_base 1^2: mod_base = OTHER; note = phosphorothioate linkage
  modified_base 2^3: mod_base = OTHER; note = phosphorothioate linkage
  modified_base 19^20: mod_base = OTHER; note = phosphorothioate linkage
  modified_base 20^21: mod_base = OTHER; note = phosphorothioate linkage
  modified_base 2: mod_base = OTHER; note = 2-fluoro-modified nucleoside
  modified_base 4: mod_base = OTHER; note = 2-fluoro-modified nucleoside
  modified_base 6: mod_base = OTHER; note = 2-fluoro-modified nucleoside
  modified_base 8: mod_base = OTHER; note = 2-fluoro-modified nucleoside
  modified_base 10: mod_base = OTHER; note = 2-fluoro-modified nucleoside
  modified_base 12: mod_base = OTHER; note = 2-fluoro-modified nucleoside
  modified_base 14: mod_base = OTHER; note = 2-fluoro-modified nucleoside
  modified_base 16: mod_base = OTHER; note = 2-fluoro-modified nucleoside
  modified_base 18: mod_base = OTHER; note = 2-fluoro-modified nucleoside
  modified_base 1: mod_base = OTHER; note = 2-O-methyl modified nucleoside
  modified_base 3: mod_base = OTHER; note = 2-O-methyl modified nucleoside
  modified_base 5: mod_base = OTHER; note = 2-O-methyl modified nucleoside
  modified_base 7: mod_base = OTHER; note = 2-O-methyl modified nucleoside
  modified_base 9: mod_base = OTHER; note = 2-O-methyl modified nucleoside
  modified_base 11: mod_base = OTHER; note = 2-O-methyl modified nucleoside
  modified_base 13: mod_base = OTHER; note = 2-O-methyl modified nucleoside
  modified_base 15: mod_base = OTHER; note = 2-O-methyl modified nucleoside
  modified_base 17: mod_base = OTHER; note = 2-O-methyl modified nucleoside
  modified_base 19: mod_base = OTHER; note = 2-O-methyl modified nucleoside
  modified_base 20: mod_base = OTHER; note = 2-O-methyl modified nucleoside
  modified_base 21: mod_base = OTHER; note = 2-O-methyl modified nucleoside
tactaccgaatctttcatctt

SEQ ID NO: 3686 - RNA, 21 nt, synthetic construct
  source 1..21: mol_type = other RNA
  modified_base 1^2: mod_base = OTHER; note = phosphorothioate linkage
  modified_base 2^3: mod_base = OTHER; note = phosphorothioate linkage
  modified_base 19^20: mod_base = OTHER; note = phosphorothioate linkage
  modified_base 20^21: mod_base = OTHER; note = phosphorothioate linkage
  modified_base 2: mod_base = OTHER; note = 2-fluoro-modified nucleoside
  modified_base 4: mod_base = OTHER; note = 2-fluoro-modified nucleoside
  modified_base 6: mod_base = OTHER; note = 2-fluoro-modified nucleoside
  modified_base 8: mod_base = OTHER; note = 2-fluoro-modified nucleoside
  modified_base 10: mod_base = OTHER; note = 2-fluoro-modified nucleoside
  modified_base 12: mod_base = OTHER; note = 2-fluoro-modified nucleoside
  modified_base 14: mod_base = OTHER; note = 2-fluoro-modified nucleoside
  modified_base 16: mod_base = OTHER; note = 2-fluoro-modified nucleoside
  modified_base 18: mod_base = OTHER; note = 2-fluoro-modified nucleoside
  modified_base 1: mod_base = OTHER; note = 2-O-methyl modified nucleoside
  modified_base 3: mod_base = OTHER; note = 2-O-methyl modified nucleoside
  modified_base 5: mod_base = OTHER; note = 2-O-methyl modified nucleoside
  modified_base 7: mod_base = OTHER; note = 2-O-methyl modified nucleoside
  modified_base 9: mod_base = OTHER; note = 2-O-methyl modified nucleoside
  modified_base 11: mod_base = OTHER; note = 2-O-methyl modified nucleoside
  modified_base 13: mod_base = OTHER; note = 2-O-methyl modified nucleoside
  modified_base 15: mod_base = OTHER; note = 2-O-methyl modified nucleoside
  modified_base 17: mod_base = OTHER; note = 2-O-methyl modified nucleoside
  modified_base 19: mod_base = OTHER; note = 2-O-methyl modified nucleoside
  modified_base 20: mod_base = OTHER; note = 2-O-methyl modified nucleoside
  modified_base 21: mod_base = OTHER; note = 2-O-methyl modified nucleoside
tactaccgaatctttcatctt

SEQ ID NO: 3687 - RNA, 21 nt, synthetic construct
  source 1..21: mol_type = other RNA
  modified_base 1^2: mod_base = OTHER; note = phosphorothioate linkage
  modified_base 2^3: mod_base = OTHER; note = phosphorothioate linkage
  modified_base 19^20: mod_base = OTHER; note = phosphorothioate linkage
  modified_base 20^21: mod_base = OTHER; note = phosphorothioate linkage
  modified_base 2: mod_base = OTHER; note = 2-fluoro-modified nucleoside
  modified_base 4: mod_base = OTHER; note = 2-fluoro-modified nucleoside
  modified_base 6: mod_base = OTHER; note = 2-fluoro-modified nucleoside
  modified_base 8: mod_base = OTHER; note = 2-fluoro-modified nucleoside
  modified_base 10: mod_base = OTHER; note = 2-fluoro-modified nucleoside
  modified_base 12: mod_base = OTHER; note = 2-fluoro-modified nucleoside
  modified_base 14: mod_base = OTHER; note = 2-fluoro-modified nucleoside
  modified_base 16: mod_base = OTHER; note = 2-fluoro-modified nucleoside
  modified_base 18: mod_base = OTHER; note = 2-fluoro-modified nucleoside
  modified_base 1: mod_base = OTHER; note = 2-O-methyl modified nucleoside
  modified_base 3: mod_base = OTHER; note = 2-O-methyl modified nucleoside
  modified_base 5: mod_base = OTHER; note = 2-O-methyl modified nucleoside
  modified_base 7: mod_base = OTHER; note = 2-O-methyl modified nucleoside
  modified_base 9: mod_base = OTHER; note = 2-O-methyl modified nucleoside
  modified_base 11: mod_base = OTHER; note = 2-O-methyl modified nucleoside
  modified_base 13: mod_base = OTHER; note = 2-O-methyl modified nucleoside
  modified_base 15: mod_base = OTHER; note = 2-O-methyl modified nucleoside
  modified_base 17: mod_base = OTHER; note = 2-O-methyl modified nucleoside
  modified_base 19: mod_base = OTHER; note = 2-O-methyl modified nucleoside
  modified_base 20: mod_base = OTHER; note = 2-O-methyl modified nucleoside
  modified_base 21: mod_base = OTHER; note = 2-O-methyl modified nucleoside
tcttatcaaatgaatcttctt

SEQ ID NO: 3688 - RNA, 21 nt, synthetic construct
  source 1..21: mol_type = other RNA
  modified_base 1^2: mod_base = OTHER; note = phosphorothioate linkage
  modified_base 2^3: mod_base = OTHER; note = phosphorothioate linkage
  modified_base 19^20: mod_base = OTHER; note = phosphorothioate linkage
  modified_base 20^21: mod_base = OTHER; note = phosphorothioate linkage
  modified_base 2: mod_base = OTHER; note = 2-fluoro-modified nucleoside
  modified_base 4: mod_base = OTHER; note = 2-fluoro-modified nucleoside
  modified_base 6: mod_base = OTHER; note = 2-fluoro-modified nucleoside
  modified_base 8: mod_base = OTHER; note = 2-fluoro-modified nucleoside
  modified_base 10: mod_base = OTHER; note = 2-fluoro-modified nucleoside
  modified_base 12: mod_base = OTHER; note = 2-fluoro-modified nucleoside
  modified_base 14: mod_base = OTHER; note = 2-fluoro-modified nucleoside
  modified_base 16: mod_base = OTHER; note = 2-fluoro-modified nucleoside
  modified_base 18: mod_base = OTHER; note = 2-fluoro-modified nucleoside
  modified_base 1: mod_base = OTHER; note = 2-O-methyl modified nucleoside
  modified_base 3: mod_base = OTHER; note = 2-O-methyl modified nucleoside
  modified_base 5: mod_base = OTHER; note = 2-O-methyl modified nucleoside
  modified_base 7: mod_base = OTHER; note = 2-O-methyl modified nucleoside
  modified_base 9: mod_base = OTHER; note = 2-O-methyl modified nucleoside
  modified_base 11: mod_base = OTHER; note = 2-O-methyl modified nucleoside
  modified_base 13: mod_base = OTHER; note = 2-O-methyl modified nucleoside
  modified_base 15: mod_base = OTHER; note = 2-O-methyl modified nucleoside
  modified_base 17: mod_base = OTHER; note = 2-O-methyl modified nucleoside
  modified_base 19: mod_base = OTHER; note = 2-O-methyl modified nucleoside
  modified_base 20: mod_base = OTHER; note = 2-O-methyl modified nucleoside
  modified_base 21: mod_base = OTHER; note = 2-O-methyl modified nucleoside
tactaccgaatctttcatctt

SEQ ID NO: 3689 - RNA, 21 nt, synthetic construct
  source 1..21: mol_type = other RNA
  modified_base 1^2: mod_base = OTHER; note = phosphorothioate linkage
  modified_base 2^3: mod_base = OTHER; note = phosphorothioate linkage
  modified_base 19^20: mod_base = OTHER; note = phosphorothioate linkage
  modified_base 20^21: mod_base = OTHER; note = phosphorothioate linkage
  modified_base 2: mod_base = OTHER; note = 2-fluoro-modified nucleoside
  modified_base 4: mod_base = OTHER; note = 2-fluoro-modified nucleoside
  modified_base 6: mod_base = OTHER; note = 2-fluoro-modified nucleoside
  modified_base 8: mod_base = OTHER; note = 2-fluoro-modified nucleoside
  modified_base 10: mod_base = OTHER; note = 2-fluoro-modified nucleoside
  modified_base 12: mod_base = OTHER; note = 2-fluoro-modified nucleoside
  modified_base 14: mod_base = OTHER; note = 2-fluoro-modified nucleoside
  modified_base 16: mod_base = OTHER; note = 2-fluoro-modified nucleoside
  modified_base 18: mod_base = OTHER; note = 2-fluoro-modified nucleoside
  modified_base 1: mod_base = OTHER; note = 2-O-methyl modified nucleoside
  modified_base 3: mod_base = OTHER; note = 2-O-methyl modified nucleoside
  modified_base 5: mod_base = OTHER; note = 2-O-methyl modified nucleoside
  modified_base 7: mod_base = OTHER; note = 2-O-methyl modified nucleoside
  modified_base 9: mod_base = OTHER; note = 2-O-methyl modified nucleoside
  modified_base 11: mod_base = OTHER; note = 2-O-methyl modified nucleoside
  modified_base 13: mod_base = OTHER; note = 2-O-methyl modified nucleoside
  modified_base 15: mod_base = OTHER; note = 2-O-methyl modified nucleoside
  modified_base 17: mod_base = OTHER; note = 2-O-methyl modified nucleoside
  modified_base 19: mod_base = OTHER; note = 2-O-methyl modified nucleoside
  modified_base 20: mod_base = OTHER; note = 2-O-methyl modified nucleoside
  modified_base 21: mod_base = OTHER; note = 2-O-methyl modified nucleoside
tactaccgaatctttcatctt

SEQ ID NO: 3690 - RNA, 21 nt, synthetic construct
  source 1..21: mol_type = other RNA
  modified_base 1^2: mod_base = OTHER; note = phosphorothioate linkage
  modified_base 2^3: mod_base = OTHER; note = phosphorothioate linkage
  modified_base 19^20: mod_base = OTHER; note = phosphorothioate linkage
  modified_base 20^21: mod_base = OTHER; note = phosphorothioate linkage
  modified_base 2: mod_base = OTHER; note = 2-fluoro-modified nucleoside
  modified_base 4: mod_base = OTHER; note = 2-fluoro-modified nucleoside
  modified_base 6: mod_base = OTHER; note = 2-fluoro-modified nucleoside
  modified_base 8: mod_base = OTHER; note = 2-fluoro-modified nucleoside
  modified_base 10: mod_base = OTHER; note = 2-fluoro-modified nucleoside
  modified_base 12: mod_base = OTHER; note = 2-fluoro-modified nucleoside
  modified_base 16: mod_base = OTHER; note = 2-fluoro-modified nucleoside
  modified_base 18: mod_base = OTHER; note = 2-fluoro-modified nucleoside
  modified_base 14: mod_base = OTHER; note = 2-fluoro-modified nucleoside
  modified_base 1: mod_base = OTHER; note = 2-O-methyl modified nucleoside
  modified_base 3: mod_base = OTHER; note = 2-O-methyl modified nucleoside
  modified_base 5: mod_base = OTHER; note = 2-O-methyl modified nucleoside
  modified_base 7: mod_base = OTHER; note = 2-O-methyl modified nucleoside
  modified_base 9: mod_base = OTHER; note = 2-O-methyl modified nucleoside
  modified_base 11: mod_base = OTHER; note = 2-O-methyl modified nucleoside
  modified_base 13: mod_base = OTHER; note = 2-O-methyl modified nucleoside
  modified_base 15: mod_base = OTHER; note = 2-O-methyl modified nucleoside
  modified_base 17: mod_base = OTHER; note = 2-O-methyl modified nucleoside
  modified_base 19: mod_base = OTHER; note = 2-O-methyl modified nucleoside
  modified_base 20: mod_base = OTHER; note = 2-O-methyl modified nucleoside
  modified_base 21: mod_base = OTHER; note = 2-O-methyl modified nucleoside
tactaccgaatctttcatctt

SEQ ID NO: 3691 - RNA, 21 nt, synthetic construct
  source 1..21: mol_type = other RNA
  modified_base 1^2: mod_base = OTHER; note = phosphorothioate linkage
  modified_base 2^3: mod_base = OTHER; note = phosphorothioate linkage
  modified_base 19^20: mod_base = OTHER; note = phosphorothioate linkage
  modified_base 20^21: mod_base = OTHER; note = phosphorothioate linkage
  modified_base 2: mod_base = OTHER; note = 2-fluoro-modified nucleoside
  modified_base 4: mod_base = OTHER; note = 2-fluoro-modified nucleoside
  modified_base 6: mod_base = OTHER; note = 2-fluoro-modified nucleoside
  modified_base 8: mod_base = OTHER; note = 2-fluoro-modified nucleoside
  modified_base 10: mod_base = OTHER; note = 2-fluoro-modified nucleoside
  modified_base 12: mod_base = OTHER; note = 2-fluoro-modified nucleoside
  modified_base 14: mod_base = OTHER; note = 2-fluoro-modified nucleoside
  modified_base 16: mod_base = OTHER; note = 2-fluoro-modified nucleoside
  modified_base 18: mod_base = OTHER; note = 2-fluoro-modified nucleoside
  modified_base 1: mod_base = OTHER; note = 2-O-methyl modified nucleoside
  modified_base 5: mod_base = OTHER; note = 2-O-methyl modified nucleoside
  modified_base 7: mod_base = OTHER; note = 2-O-methyl modified nucleoside
  modified_base 9: mod_base = OTHER; note = 2-O-methyl modified nucleoside
  modified_base 11: mod_base = OTHER; note = 2-O-methyl modified nucleoside
  modified_base 13: mod_base = OTHER; note = 2-O-methyl modified nucleoside
  modified_base 15: mod_base = OTHER; note = 2-O-methyl modified nucleoside
  modified_base 17: mod_base = OTHER; note = 2-O-methyl modified nucleoside
  modified_base 19: mod_base = OTHER; note = 2-O-methyl modified nucleoside
  modified_base 20: mod_base = OTHER; note = 2-O-methyl modified nucleoside
  modified_base 21: mod_base = OTHER; note = 2-O-methyl modified nucleoside
tgaccaactcatgatgtcttt

SEQ ID NO: 3692 - RNA, 21 nt, synthetic construct
  source 1..21: mol_type = other RNA
  modified_base 1^2: mod_base = OTHER; note = phosphorothioate linkage
  modified_base 2^3: mod_base = OTHER; note = phosphorothioate linkage
  modified_base 19^20: mod_base = OTHER; note = phosphorothioate linkage
  modified_base 20^21: mod_base = OTHER; note = phosphorothioate linkage
  modified_base 2: mod_base = OTHER; note = 2-fluoro-modified nucleoside
  modified_base 4: mod_base = OTHER; note = 2-fluoro-modified nucleoside
  modified_base 6: mod_base = OTHER; note = 2-fluoro-modified nucleoside
  modified_base 8: mod_base = OTHER; note = 2-fluoro-modified nucleoside
  modified_base 10: mod_base = OTHER; note = 2-fluoro-modified nucleoside
  modified_base 12: mod_base = OTHER; note = 2-fluoro-modified nucleoside
  modified_base 14: mod_base = OTHER; note = 2-fluoro-modified nucleoside
  modified_base 16: mod_base = OTHER; note = 2-fluoro-modified nucleoside
  modified_base 18: mod_base = OTHER; note = 2-fluoro-modified nucleoside
  modified_base 1: mod_base = OTHER; note = 2-O-methyl modified nucleoside
  modified_base 3: mod_base = OTHER; note = 2-O-methyl modified nucleoside
  modified_base 5: mod_base = OTHER; note = 2-O-methyl modified nucleoside
  modified_base 7: mod_base = OTHER; note = 2-O-methyl modified nucleoside
  modified_base 9: mod_base = OTHER; note = 2-O-methyl modified nucleoside
  modified_base 11: mod_base = OTHER; note = 2-O-methyl modified nucleoside
  modified_base 13: mod_base = OTHER; note = 2-O-methyl modified nucleoside
  modified_base 15: mod_base = OTHER; note = 2-O-methyl modified nucleoside
  modified_base 17: mod_base = OTHER; note = 2-O-methyl modified nucleoside
  modified_base 19: mod_base = OTHER; note = 2-O-methyl modified nucleoside
  modified_base 20: mod_base = OTHER; note = 2-O-methyl modified nucleoside
  modified_base 21: mod_base = OTHER; note = 2-O-methyl modified nucleoside
tgttctgccattccagtcttt

SEQ ID NO: 3693 - RNA, 21 nt, synthetic construct
  source 1..21: mol_type = other RNA
  modified_base 1^2: mod_base = OTHER; note = phosphorothioate linkage
  modified_base 2^3: mod_base = OTHER; note = phosphorothioate linkage
  modified_base 19^20: mod_base = OTHER; note = phosphorothioate linkage
  modified_base 20^21: mod_base = OTHER; note = phosphorothioate linkage
  modified_base 2: mod_base = OTHER; note = 2-fluoro-modified nucleoside
  modified_base 4: mod_base = OTHER; note = 2-fluoro-modified nucleoside
  modified_base 6: mod_base = OTHER; note = 2-fluoro-modified nucleoside
  modified_base 8: mod_base = OTHER; note = 2-fluoro-modified nucleoside
  modified_base 10: mod_base = OTHER; note = 2-fluoro-modified nucleoside
  modified_base 12: mod_base = OTHER; note = 2-fluoro-modified nucleoside
  modified_base 14: mod_base = OTHER; note = 2-fluoro-modified nucleoside
  modified_base 16: mod_base = OTHER; note = 2-fluoro-modified nucleoside
  modified_base 18: mod_base = OTHER; note = 2-fluoro-modified nucleoside
  modified_base 1: mod_base = OTHER; note = 2-O-methyl modified nucleoside
  modified_base 3: mod_base = OTHER; note = 2-O-methyl modified nucleoside
  modified_base 5: mod_base = OTHER; note = 2-O-methyl modified nucleoside
  modified_base 7: mod_base = OTHER; note = 2-O-methyl modified nucleoside
  modified_base 9: mod_base = OTHER; note = 2-O-methyl modified nucleoside
  modified_base 11: mod_base = OTHER; note = 2-O-methyl modified nucleoside
  modified_base 13: mod_base = OTHER; note = 2-O-methyl modified nucleoside
  modified_base 15: mod_base = OTHER; note = 2-O-methyl modified nucleoside
  modified_base 17: mod_base = OTHER; note = 2-O-methyl modified nucleoside
  modified_base 19: mod_base = OTHER; note = 2-O-methyl modified nucleoside
  modified_base 20: mod_base = OTHER; note = 2-O-methyl modified nucleoside
  modified_base 21: mod_base = OTHER; note = 2-O-methyl modified nucleoside
tgatgtgaaaaacttgtcatt

SEQ ID NO: 3694 - RNA, 21 nt, synthetic construct
  source 1..21: mol_type = other RNA
  modified_base 1^2: mod_base = OTHER; note = phosphorothioate linkage
  modified_base 2^3: mod_base = OTHER; note = phosphorothioate linkage
  modified_base 19^20: mod_base = OTHER; note = phosphorothioate linkage
  modified_base 20^21: mod_base = OTHER; note = phosphorothioate linkage
  modified_base 2: mod_base = OTHER; note = 2-fluoro-modified nucleoside
  modified_base 4: mod_base = OTHER; note = 2-fluoro-modified nucleoside
  modified_base 6: mod_base = OTHER; note = 2-fluoro-modified nucleoside
  modified_base 8: mod_base = OTHER; note = 2-fluoro-modified nucleoside
  modified_base 10: mod_base = OTHER; note = 2-fluoro-modified nucleoside
  modified_base 12: mod_base = OTHER; note = 2-fluoro-modified nucleoside
  modified_base 14: mod_base = OTHER; note = 2-fluoro-modified nucleoside
  modified_base 16: mod_base = OTHER; note = 2-fluoro-modified nucleoside
  modified_base 18: mod_base = OTHER; note = 2-fluoro-modified nucleoside
  modified_base 1: mod_base = OTHER; note = 2-O-methyl modified nucleoside
  modified_base 3: mod_base = OTHER; note = 2-O-methyl modified nucleoside
  modified_base 5: mod_base = OTHER; note = 2-O-methyl modified nucleoside
  modified_base 7: mod_base = OTHER; note = 2-O-methyl modified nucleoside
  modified_base 9: mod_base = OTHER; note = 2-O-methyl modified nucleoside
  modified_base 11: mod_base = OTHER; note = 2-O-methyl modified nucleoside
  modified_base 13: mod_base = OTHER; note = 2-O-methyl modified nucleoside
  modified_base 15: mod_base = OTHER; note = 2-O-methyl modified nucleoside
  modified_base 17: mod_base = OTHER; note = 2-O-methyl modified nucleoside
  modified_base 19: mod_base = OTHER; note = 2-O-methyl modified nucleoside
  modified_base 21: mod_base = OTHER; note = 2-O-methyl modified nucleoside
  modified_base 20: mod_base = OTHER; note = 2-O-methyl modified nucleoside
tgatgtgaaaaacttgtcatt

SEQ ID NO: 3695 - RNA, 21 nt, synthetic construct
  source 1..21: mol_type = other RNA
  modified_base 1^2: mod_base = OTHER; note = phosphorothioate linkage
  modified_base 2^3: mod_base = OTHER; note = phosphorothioate linkage
  modified_base 19^20: mod_base = OTHER; note = phosphorothioate linkage
  modified_base 20^21: mod_base = OTHER; note = phosphorothioate linkage
  modified_base 2: mod_base = OTHER; note = 2-fluoro-modified nucleoside
  modified_base 4: mod_base = OTHER; note = 2-fluoro-modified nucleoside
  modified_base 6: mod_base = OTHER; note = 2-fluoro-modified nucleoside
  modified_base 8: mod_base = OTHER; note = 2-fluoro-modified nucleoside
  modified_base 10: mod_base = OTHER; note = 2-fluoro-modified nucleoside
  modified_base 12: mod_base = OTHER; note = 2-fluoro-modified nucleoside
  modified_base 14: mod_base = OTHER; note = 2-fluoro-modified nucleoside
  modified_base 16: mod_base = OTHER; note = 2-fluoro-modified nucleoside
  modified_base 18: mod_base = OTHER; note = 2-fluoro-modified nucleoside
  modified_base 1: mod_base = OTHER; note = 2-O-methyl modified nucleoside
  modified_base 3: mod_base = OTHER; note = 2-O-methyl modified nucleoside
  modified_base 5: mod_base = OTHER; note = 2-O-methyl modified nucleoside
  modified_base 7: mod_base = OTHER; note = 2-O-methyl modified nucleoside
  modified_base 9: mod_base = OTHER; note = 2-O-methyl modified nucleoside
  modified_base 11: mod_base = OTHER; note = 2-O-methyl modified nucleoside
  modified_base 13: mod_base = OTHER; note = 2-O-methyl modified nucleoside
  modified_base 15: mod_base = OTHER; note = 2-O-methyl modified nucleoside
  modified_base 17: mod_base = OTHER; note = 2-O-methyl modified nucleoside
  modified_base 19: mod_base = OTHER; note = 2-O-methyl modified nucleoside
  modified_base 20: mod_base = OTHER; note = 2-O-methyl modified nucleoside
  modified_base 21: mod_base = OTHER; note = 2-O-methyl modified nucleoside
tggatgtgaaaaacttgtctt

SEQ ID NO: 3696 - RNA, 21 nt, synthetic construct
  source 1..21: mol_type = other RNA
  modified_base 1^2: mod_base = OTHER; note = phosphorothioate linkage
  modified_base 2^3: mod_base = OTHER; note = phosphorothioate linkage
  modified_base 19^20: mod_base = OTHER; note = phosphorothioate linkage
  modified_base 20^21: mod_base = OTHER; note = phosphorothioate linkage
  modified_base 2: mod_base = OTHER; note = 2-fluoro-modified nucleoside
  modified_base 4: mod_base = OTHER; note = 2-fluoro-modified nucleoside
  modified_base 6: mod_base = OTHER; note = 2-fluoro-modified nucleoside
  modified_base 8: mod_base = OTHER; note = 2-fluoro-modified nucleoside
  modified_base 10: mod_base = OTHER; note = 2-fluoro-modified nucleoside
  modified_base 12: mod_base = OTHER; note = 2-fluoro-modified nucleoside
  modified_base 14: mod_base = OTHER; note = 2-fluoro-modified nucleoside
  modified_base 16: mod_base = OTHER; note = 2-fluoro-modified nucleoside
  modified_base 18: mod_base = OTHER; note = 2-fluoro-modified nucleoside
  modified_base 1: mod_base = OTHER; note = 2-O-methyl modified nucleoside
  modified_base 3: mod_base = OTHER; note = 2-O-methyl modified nucleoside
  modified_base 5: mod_base = OTHER; note = 2-O-methyl modified nucleoside
  modified_base 7: mod_base = OTHER; note = 2-O-methyl modified nucleoside
  modified_base 9: mod_base = OTHER; note = 2-O-methyl modified nucleoside
  modified_base 11: mod_base = OTHER; note = 2-O-methyl modified nucleoside
  modified_base 13: mod_base = OTHER; note = 2-O-methyl modified nucleoside
  modified_base 15: mod_base = OTHER; note = 2-O-methyl modified nucleoside
  modified_base 17: mod_base = OTHER; note = 2-O-methyl modified nucleoside
  modified_base 19: mod_base = OTHER; note = 2-O-methyl modified nucleoside
  modified_base 20: mod_base = OTHER; note = 2-O-methyl modified nucleoside
  modified_base 21: mod_base = OTHER; note = 2-O-methyl modified nucleoside
tcaccttggtaataaactctt

SEQ ID NO: 3697 - RNA, 21 nt, synthetic construct
  source 1..21: mol_type = other RNA
  modified_base 1^2: mod_base = OTHER; note = phosphorothioate linkage
  modified_base 2^3: mod_base = OTHER; note = phosphorothioate linkage
  modified_base 19^20: mod_base = OTHER; note = phosphorothioate linkage
  modified_base 20^21: mod_base = OTHER; note = phosphorothioate linkage
  modified_base 2: mod_base = OTHER; note = 2-fluoro-modified nucleoside
  modified_base 4: mod_base = OTHER; note = 2-fluoro-modified nucleoside
  modified_base 6: mod_base = OTHER; note = 2-fluoro-modified nucleoside
  modified_base 8: mod_base = OTHER; note = 2-fluoro-modified nucleoside
  modified_base 10: mod_base = OTHER; note = 2-fluoro-modified nucleoside
  modified_base 12: mod_base = OTHER; note = 2-fluoro-modified nucleoside
  modified_base 14: mod_base = OTHER; note = 2-fluoro-modified nucleoside
  modified_base 16: mod_base = OTHER; note = 2-fluoro-modified nucleoside
  modified_base 18: mod_base = OTHER; note = 2-fluoro-modified nucleoside
  modified_base 1: mod_base = OTHER; note = 2-O-methyl modified nucleoside
  modified_base 3: mod_base = OTHER; note = 2-O-methyl modified nucleoside
  modified_base 5: mod_base = OTHER; note = 2-O-methyl modified nucleoside
  modified_base 7: mod_base = OTHER; note = 2-O-methyl modified nucleoside
  modified_base 9: mod_base = OTHER; note = 2-O-methyl modified nucleoside
  modified_base 11: mod_base = OTHER; note = 2-O-methyl modified nucleoside
  modified_base 13: mod_base = OTHER; note = 2-O-methyl modified nucleoside
  modified_base 15: mod_base = OTHER; note = 2-O-methyl modified nucleoside
  modified_base 17: mod_base = OTHER; note = 2-O-methyl modified nucleoside
  modified_base 19: mod_base = OTHER; note = 2-O-methyl modified nucleoside
  modified_base 20: mod_base = OTHER; note = 2-O-methyl modified nucleoside
  modified_base 21: mod_base = OTHER; note = 2-O-methyl modified nucleoside
tgtaagtgccaccttggtatt

SEQ ID NO: 3698 - RNA, 21 nt, synthetic construct
  source 1..21: mol_type = other RNA
  modified_base 1^2: mod_base = OTHER; note = phosphorothioate linkage
  modified_base 2^3: mod_base = OTHER; note = phosphorothioate linkage
  modified_base 19^20: mod_base = OTHER; note = phosphorothioate linkage
  modified_base 20^21: mod_base = OTHER; note = phosphorothioate linkage
  modified_base 2: mod_base = OTHER; note = 2-fluoro-modified nucleoside
  modified_base 4: mod_base = OTHER; note = 2-fluoro-modified nucleoside
  modified_base 6: mod_base = OTHER; note = 2-fluoro-modified nucleoside
  modified_base 8: mod_base = OTHER; note = 2-fluoro-modified nucleoside
  modified_base 10: mod_base = OTHER; note = 2-fluoro-modified nucleoside
  modified_base 12: mod_base = OTHER; note = 2-fluoro-modified nucleoside
  modified_base 14: mod_base = OTHER; note = 2-fluoro-modified nucleoside
  modified_base 16: mod_base = OTHER; note = 2-fluoro-modified nucleoside
  modified_base 18: mod_base = OTHER; note = 2-fluoro-modified nucleoside
  modified_base 1: mod_base = OTHER; note = 2-O-methyl modified nucleoside
  modified_base 3: mod_base = OTHER; note = 2-O-methyl modified nucleoside
  modified_base 5: mod_base = OTHER; note = 2-O-methyl modified nucleoside
  modified_base 7: mod_base = OTHER; note = 2-O-methyl modified nucleoside
  modified_base 9: mod_base = OTHER; note = 2-O-methyl modified nucleoside
  modified_base 11: mod_base = OTHER; note = 2-O-methyl modified nucleoside
  modified_base 13: mod_base = OTHER; note = 2-O-methyl modified nucleoside
  modified_base 15: mod_base = OTHER; note = 2-O-methyl modified nucleoside
  modified_base 17: mod_base = OTHER; note = 2-O-methyl modified nucleoside
  modified_base 19: mod_base = OTHER; note = 2-O-methyl modified nucleoside
  modified_base 20: mod_base = OTHER; note = 2-O-methyl modified nucleoside
  modified_base 21: mod_base = OTHER; note = 2-O-methyl modified nucleoside
tagtaagtgccaccttggttt

SEQ ID NO: 3699 - RNA, 21 nt, synthetic construct
  source 1..21: mol_type = other RNA
  modified_base 1^2: mod_base = OTHER; note = phosphorothioate linkage
  modified_base 2^3: mod_base = OTHER; note = phosphorothioate linkage
  modified_base 19^20: mod_base = OTHER; note = phosphorothioate linkage
  modified_base 20^21: mod_base = OTHER; note = phosphorothioate linkage
  modified_base 2: mod_base = OTHER; note = 2-fluoro-modified nucleoside
  modified_base 4: mod_base = OTHER; note = 2-fluoro-modified nucleoside
  modified_base 6: mod_base = OTHER; note = 2-fluoro-modified nucleoside
  modified_base 8: mod_base = OTHER; note = 2-fluoro-modified nucleoside
  modified_base 10: mod_base = OTHER; note = 2-fluoro-modified nucleoside
  modified_base 12: mod_base = OTHER; note = 2-fluoro-modified nucleoside
  modified_base 14: mod_base = OTHER; note = 2-fluoro-modified nucleoside
  modified_base 16: mod_base = OTHER; note = 2-fluoro-modified nucleoside
  modified_base 18: mod_base = OTHER; note = 2-fluoro-modified nucleoside
  modified_base 1: mod_base = OTHER; note = 2-O-methyl modified nucleoside
  modified_base 3: mod_base = OTHER; note = 2-O-methyl modified nucleoside
  modified_base 5: mod_base = OTHER; note = 2-O-methyl modified nucleoside
  modified_base 7: mod_base = OTHER; note = 2-O-methyl modified nucleoside
  modified_base 9: mod_base = OTHER; note = 2-O-methyl modified nucleoside
  modified_base 11: mod_base = OTHER; note = 2-O-methyl modified nucleoside
  modified_base 13: mod_base = OTHER; note = 2-O-methyl modified nucleoside
  modified_base 15: mod_base = OTHER; note = 2-O-methyl modified nucleoside
  modified_base 17: mod_base = OTHER; note = 2-O-methyl modified nucleoside
  modified_base 19: mod_base = OTHER; note = 2-O-methyl modified nucleoside
  modified_base 20: mod_base = OTHER; note = 2-O-methyl modified nucleoside
  modified_base 21: mod_base = OTHER; note = 2-O-methyl modified nucleoside
tttgagtaagtgccacctttt

SEQ ID NO: 3700 - RNA, 21 nt, synthetic construct
  source 1..21: mol_type = other RNA
  modified_base 1^2: mod_base = OTHER; note = phosphorothioate linkage
  modified_base 2^3: mod_base = OTHER; note = phosphorothioate linkage
  modified_base 19^20: mod_base = OTHER; note = phosphorothioate linkage
  modified_base 20^21: mod_base = OTHER; note = phosphorothioate linkage
  modified_base 2: mod_base = OTHER; note = 2-fluoro-modified nucleoside
  modified_base 4: mod_base = OTHER; note = 2-fluoro-modified nucleoside
  modified_base 6: mod_base = OTHER; note = 2-fluoro-modified nucleoside
  modified_base 8: mod_base = OTHER; note = 2-fluoro-modified nucleoside
  modified_base 10: mod_base = OTHER; note = 2-fluoro-modified nucleoside
  modified_base 12: mod_base = OTHER; note = 2-fluoro-modified nucleoside
  modified_base 14: mod_base = OTHER; note = 2-fluoro-modified nucleoside
  modified_base 16: mod_base = OTHER; note = 2-fluoro-modified nucleoside
  modified_base 18: mod_base = OTHER; note = 2-fluoro-modified nucleoside
  modified_base 1: mod_base = OTHER; note = 2-O-methyl modified nucleoside
  modified_base 3: mod_base = OTHER; note = 2-O-methyl modified nucleoside
  modified_base 5: mod_base = OTHER; note = 2-O-methyl modified nucleoside
  modified_base 7: mod_base = OTHER; note = 2-O-methyl modified nucleoside
  modified_base 9: mod_base = OTHER; note = 2-O-methyl modified nucleoside
  modified_base 11: mod_base = OTHER; note = 2-O-methyl modified nucleoside
  modified_base 13: mod_base = OTHER; note = 2-O-methyl modified nucleoside
  modified_base 15: mod_base = OTHER; note = 2-O-methyl modified nucleoside
  modified_base 17: mod_base = OTHER; note = 2-O-methyl modified nucleoside
  modified_base 19: mod_base = OTHER; note = 2-O-methyl modified nucleoside
  modified_base 20: mod_base = OTHER; note = 2-O-methyl modified nucleoside
  modified_base 21: mod_base = OTHER; note = 2-O-methyl modified nucleoside
ttttgagtaagtgccaccttt

SEQ ID NO: 3701 - RNA, 21 nt, synthetic construct
  source 1..21: mol_type = other RNA
  modified_base 1^2: mod_base = OTHER; note = phosphorothioate linkage
  modified_base 2^3: mod_base = OTHER; note = phosphorothioate linkage
  modified_base 19^20: mod_base = OTHER; note = phosphorothioate linkage
  modified_base 20^21: mod_base = OTHER; note = phosphorothioate linkage
  modified_base 4: mod_base = OTHER; note = any deoxynucleotide
  modified_base 6: mod_base = OTHER; note = any deoxynucleotide
  modified_base 13: mod_base = OTHER; note = any deoxynucleotide
  modified_base 16: mod_base = OTHER; note = any deoxynucleotide
  modified_base 2: mod_base = OTHER; note = 2-fluoro-modified nucleoside
  modified_base 7: mod_base = OTHER; note = 2-fluoro-modified nucleoside
  modified_base 9: mod_base = OTHER; note = 2-fluoro-modified nucleoside
  modified_base 11: mod_base = OTHER; note = 2-fluoro-modified nucleoside
  modified_base 18: mod_base = OTHER; note = 2-fluoro-modified nucleoside
  modified_base 1: mod_base = OTHER; note = 2-O-methyl modified nucleoside
  modified_base 3: mod_base = OTHER; note = 2-O-methyl modified nucleoside
  modified_base 5: mod_base = OTHER; note = 2-O-methyl modified nucleoside
  modified_base 7: mod_base = OTHER; note = 2-O-methyl modified nucleoside
  modified_base 9: mod_base = OTHER; note = 2-O-methyl modified nucleoside
  modified_base 13: mod_base = OTHER; note = 2-O-methyl modified nucleoside
  modified_base 15: mod_base = OTHER; note = 2-O-methyl modified nucleoside
  modified_base 17: mod_base = OTHER; note = 2-O-methyl modified nucleoside
  modified_base 19: mod_base = OTHER; note = 2-O-methyl modified nucleoside
  modified_base 20: mod_base = OTHER; note = 2-O-methyl modified nucleoside
  modified_base 21: mod_base = OTHER; note = 2-O-methyl modified nucleoside
tactaccgaatctttcatctt

SEQ ID NO: 3702 - RNA, 21 nt, synthetic construct
  source 1..21: mol_type = other RNA
  modified_base 1^2: mod_base = OTHER; note = phosphorothioate linkage
  modified_base 2^3: mod_base = OTHER; note = phosphorothioate linkage
  modified_base 19^20: mod_base = OTHER; note = phosphorothioate linkage
  modified_base 20^21: mod_base = OTHER; note = phosphorothioate linkage
  modified_base 4: mod_base = OTHER; note = any deoxynucleotide
  modified_base 6: mod_base = OTHER; note = any deoxynucleotide
  modified_base 12: mod_base = OTHER; note = any deoxynucleotide
  modified_base 14: mod_base = OTHER; note = any deoxynucleotide
  modified_base 16: mod_base = OTHER; note = any deoxynucleotide
  modified_base 18: mod_base = OTHER; note = any deoxynucleotide
  modified_base 2: mod_base = OTHER; note = 2-fluoro-modified nucleoside
  modified_base 7: mod_base = OTHER; note = 2-fluoro-modified nucleoside
  modified_base 9: mod_base = OTHER; note = 2-fluoro-modified nucleoside
  modified_base 11: mod_base = OTHER; note = 2-fluoro-modified nucleoside
  modified_base 1: mod_base = OTHER; note = 2-O-methyl modified nucleoside
  modified_base 3: mod_base = OTHER; note = 2-O-methyl modified nucleoside
  modified_base 5: mod_base = OTHER; note = 2-O-methyl modified nucleoside
  modified_base 11: mod_base = OTHER; note = 2-O-methyl modified nucleoside
  modified_base 13: mod_base = OTHER; note = 2-O-methyl modified nucleoside
  modified_base 15: mod_base = OTHER; note = 2-O-methyl modified nucleoside
  modified_base 17: mod_base = OTHER; note = 2-O-methyl modified nucleoside
  modified_base 19: mod_base = OTHER; note = 2-O-methyl modified nucleoside
  modified_base 20: mod_base = OTHER; note = 2-O-methyl modified nucleoside
  modified_base 21: mod_base = OTHER; note = 2-O-methyl modified nucleoside
tactaccgaatctttcatctt

SEQ ID NO: 3703 - RNA, 21 nt, synthetic construct
  source 1..21: mol_type = other RNA
  modified_base 1^2: mod_base = OTHER; note = phosphorothioate linkage
  modified_base 2^3: mod_base = OTHER; note = phosphorothioate linkage
  modified_base 19^20: mod_base = OTHER; note = phosphorothioate linkage
  modified_base 20^21: mod_base = OTHER; note = phosphorothioate linkage
  modified_base 2: mod_base = OTHER; note = 2-fluoro-modified nucleoside
  modified_base 6: mod_base = OTHER; note = 2-fluoro-modified nucleoside
  modified_base 10: mod_base = OTHER; note = 2-fluoro-modified nucleoside
  modified_base 12: mod_base = OTHER; note = 2-fluoro-modified nucleoside
  modified_base 14: mod_base = OTHER; note = 2-fluoro-modified nucleoside
  modified_base 16: mod_base = OTHER; note = 2-fluoro-modified nucleoside
  modified_base 18: mod_base = OTHER; note = 2-fluoro-modified nucleoside
  modified_base 1: mod_base = OTHER; note = 2-O-methyl modified nucleoside
  modified_base 3: mod_base = OTHER; note = 2-O-methyl modified nucleoside
  modified_base 4: mod_base = OTHER; note = 2-O-methyl modified nucleoside
  modified_base 5: mod_base = OTHER; note = 2-O-methyl modified nucleoside
  modified_base 7: mod_base = OTHER; note = 2-O-methyl modified nucleoside
  modified_base 8: mod_base = OTHER; note = 2-O-methyl modified nucleoside
  modified_base 9: mod_base = OTHER; note = 2-O-methyl modified nucleoside
  modified_base 11: mod_base = OTHER; note = 2-O-methyl modified nucleoside
  modified_base 13: mod_base = OTHER; note = 2-O-methyl modified nucleoside
  modified_base 15: mod_base = OTHER; note = 2-O-methyl modified nucleoside
  modified_base 17: mod_base = OTHER; note = 2-O-methyl modified nucleoside
  modified_base 19: mod_base = OTHER; note = 2-O-methyl modified nucleoside
  modified_base 20: mod_base = OTHER; note = 2-O-methyl modified nucleoside
  modified_base 21: mod_base = OTHER; note = 2-O-methyl modified nucleoside
tactaccgaatctttcatctt

SEQ ID NO: 3704 - RNA, 21 nt, synthetic construct
  source 1..21: mol_type = other RNA
  modified_base 1: mod_base = OTHER; note = any deoxynucleotide
  modified_base 2: mod_base = OTHER; note = 2-fluoro-modified nucleoside
  modified_base 6: mod_base = OTHER; note = 2-fluoro-modified nucleoside
  modified_base 8: mod_base = OTHER; note = 2-fluoro-modified nucleoside
  modified_base 10: mod_base = OTHER; note = 2-fluoro-modified nucleoside
  modified_base 12: mod_base = OTHER; note = 2-fluoro-modified nucleoside
  modified_base 14: mod_base = OTHER; note = 2-fluoro-modified nucleoside
  modified_base 16: mod_base = OTHER; note = 2-fluoro-modified nucleoside
  modified_base 18: mod_base = OTHER; note = 2-fluoro-modified nucleoside
  modified_base 1^2: mod_base = OTHER; note = phosphorothioate linkage
  modified_base 2^3: mod_base = OTHER; note = phosphorothioate linkage
  modified_base 19^20: mod_base = OTHER; note = phosphorothioate linkage
  modified_base 20^21: mod_base = OTHER; note = phosphorothioate linkage
  modified_base 3: mod_base = OTHER; note = 2-O-methyl modified nucleoside
  modified_base 4: mod_base = OTHER; note = 2-O-methyl modified nucleoside
  modified_base 5: mod_base = OTHER; note = 2-O-methyl modified nucleoside
  modified_base 7: mod_base = OTHER; note = 2-O-methyl modified nucleoside
  modified_base 9: mod_base = OTHER; note = 2-O-methyl modified nucleoside
  modified_base 11: mod_base = OTHER; note = 2-O-methyl modified nucleoside
  modified_base 13: mod_base = OTHER; note = 2-O-methyl modified nucleoside
  modified_base 15: mod_base = OTHER; note = 2-O-methyl modified nucleoside
  modified_base 17: mod_base = OTHER; note = 2-O-methyl modified nucleoside
  modified_base 19: mod_base = OTHER; note = 2-O-methyl modified nucleoside
  modified_base 20: mod_base = OTHER; note = 2-O-methyl modified nucleoside
  modified_base 21: mod_base = OTHER; note = 2-O-methyl modified nucleoside
tactaccgaatctttcatctt

SEQ ID NO: 3705 - RNA, 21 nt, synthetic construct
  source 1..21: mol_type = other RNA
  modified_base 1^2: mod_base = OTHER; note = phosphorothioate linkage
  modified_base 2^3: mod_base = OTHER; note = phosphorothioate linkage
  modified_base 19^20: mod_base = OTHER; note = phosphorothioate linkage
  modified_base 20^21: mod_base = OTHER; note = phosphorothioate linkage
  modified_base 1: mod_base = OTHER; note = 2-fluoro-modified nucleoside
  modified_base 2: mod_base = OTHER; note = 2-fluoro-modified nucleoside
  modified_base 6: mod_base = OTHER; note = 2-fluoro-modified nucleoside
  modified_base 8: mod_base = OTHER; note = 2-fluoro-modified nucleoside
  modified_base 10: mod_base = OTHER; note = 2-fluoro-modified nucleoside
  modified_base 12: mod_base = OTHER; note = 2-fluoro-modified nucleoside
  modified_base 14: mod_base = OTHER; note = 2-fluoro-modified nucleoside
  modified_base 16: mod_base = OTHER; note = 2-fluoro-modified nucleoside
  modified_base 18: mod_base = OTHER; note = 2-fluoro-modified nucleoside
  modified_base 3: mod_base = OTHER; note = 2-O-methyl modified nucleoside
  modified_base 4: mod_base = OTHER; note = 2-O-methyl modified nucleoside
  modified_base 5: mod_base = OTHER; note = 2-O-methyl modified nucleoside
  modified_base 7: mod_base = OTHER; note = 2-O-methyl modified nucleoside
  modified_base 9: mod_base = OTHER; note = 2-O-methyl modified nucleoside
  modified_base 11: mod_base = OTHER; note = 2-O-methyl modified nucleoside
  modified_base 13: mod_base = OTHER; note = 2-O-methyl modified nucleoside
  modified_base 15: mod_base = OTHER; note = 2-O-methyl modified nucleoside
  modified_base 17: mod_base = OTHER; note = 2-O-methyl modified nucleoside
  modified_base 19: mod_base = OTHER; note = 2-O-methyl modified nucleoside
  modified_base 20: mod_base = OTHER; note = 2-O-methyl modified nucleoside
  modified_base 21: mod_base = OTHER; note = 2-O-methyl modified nucleoside
tactaccgaatctttcatctt

SEQ ID NO: 3706 - RNA, 21 nt, synthetic construct
  source 1..21: mol_type = other RNA
  modified_base 1^2: mod_base = OTHER; note = phosphorothioate linkage
  modified_base 2^3: mod_base = OTHER; note = phosphorothioate linkage
  modified_base 19^20: mod_base = OTHER; note = phosphorothioate linkage
  modified_base 20^21: mod_base = OTHER; note = phosphorothioate linkage
  modified_base 2: mod_base = OTHER; note = 2-fluoro-modified nucleoside
  modified_base 4: mod_base = OTHER; note = 2-fluoro-modified nucleoside
  modified_base 6: mod_base = OTHER; note = 2-fluoro-modified nucleoside
  modified_base 8: mod_base = OTHER; note = 2-fluoro-modified nucleoside
  modified_base 10: mod_base = OTHER; note = 2-fluoro-modified nucleoside
  modified_base 12: mod_base = OTHER; note = 2-fluoro-modified nucleoside
  modified_base 14: mod_base = OTHER; note = 2-fluoro-modified nucleoside
  modified_base 16: mod_base = OTHER; note = 2-fluoro-modified nucleoside
  modified_base 18: mod_base = OTHER; note = 2-fluoro-modified nucleoside
  modified_base 1: mod_base = OTHER; note = 2-O-methyl modified nucleoside
  modified_base 3: mod_base = OTHER; note = 2-O-methyl modified nucleoside
  modified_base 5: mod_base = OTHER; note = 2-O-methyl modified nucleoside
  modified_base 7: mod_base = OTHER; note = 2-O-methyl modified nucleoside
  modified_base 9: mod_base = OTHER; note = 2-O-methyl modified nucleoside
  modified_base 11: mod_base = OTHER; note = 2-O-methyl modified nucleoside
  modified_base 13: mod_base = OTHER; note = 2-O-methyl modified nucleoside
  modified_base 15: mod_base = OTHER; note = 2-O-methyl modified nucleoside
  modified_base 17: mod_base = OTHER; note = 2-O-methyl modified nucleoside
  modified_base 19: mod_base = OTHER; note = 2-O-methyl modified nucleoside
  modified_base 20: mod_base = OTHER; note = 2-O-methyl modified nucleoside
  modified_base 21: mod_base = OTHER; note = 2-O-methyl modified nucleoside
tgatgtgaaaaacttgtcatt

SEQ ID NO: 3707 - RNA, 21 nt, synthetic construct
  source 1..21: mol_type = other RNA
  modified_base 1^2: mod_base = OTHER; note = phosphorothioate linkage
  modified_base 2^3: mod_base = OTHER; note = phosphorothioate linkage
  modified_base 19^20: mod_base = OTHER; note = phosphorothioate linkage
  modified_base 20^21: mod_base = OTHER; note = phosphorothioate linkage
  modified_base 2: mod_base = OTHER; note = 2-fluoro-modified nucleoside
  modified_base 4: mod_base = OTHER; note = 2-fluoro-modified nucleoside
  modified_base 6: mod_base = OTHER; note = 2-fluoro-modified nucleoside
  modified_base 8: mod_base = OTHER; note = 2-fluoro-modified nucleoside
  modified_base 10: mod_base = OTHER; note = 2-fluoro-modified nucleoside
  modified_base 12: mod_base = OTHER; note = 2-fluoro-modified nucleoside
  modified_base 14: mod_base = OTHER; note = 2-fluoro-modified nucleoside
  modified_base 16: mod_base = OTHER; note = 2-fluoro-modified nucleoside
  modified_base 18: mod_base = OTHER; note = 2-fluoro-modified nucleoside
  modified_base 17: mod_base = OTHER; note = 2-O-methyl modified nucleoside
  modified_base 19: mod_base = OTHER; note = 2-O-methyl modified nucleoside
  modified_base 20: mod_base = OTHER; note = 2-O-methyl modified nucleoside
  modified_base 21: mod_base = OTHER; note = 2-O-methyl modified nucleoside
tgatgtgaaaaacttgtcatt

SEQ ID NO: 3708 - RNA, 21 nt, synthetic construct
  source 1..21: mol_type = other RNA
  modified_base 1^2: mod_base = OTHER; note = phosphorothioate linkage
  modified_base 2^3: mod_base = OTHER; note = phosphorothioate linkage
  modified_base 19^20: mod_base = OTHER; note = phosphorothioate linkage
  modified_base 20^21: mod_base = OTHER; note = phosphorothioate linkage
  modified_base 2: mod_base = OTHER; note = 2-fluoro-modified nucleoside
  modified_base 4: mod_base = OTHER; note = 2-fluoro-modified nucleoside
  modified_base 6: mod_base = OTHER; note = 2-fluoro-modified nucleoside
  modified_base 8: mod_base = OTHER; note = 2-fluoro-modified nucleoside
  modified_base 10: mod_base = OTHER; note = 2-fluoro-modified nucleoside
  modified_base 12: mod_base = OTHER; note = 2-fluoro-modified nucleoside
  modified_base 14: mod_base = OTHER; note = 2-fluoro-modified nucleoside
  modified_base 16: mod_base = OTHER; note = 2-fluoro-modified nucleoside
  modified_base 18: mod_base = OTHER; note = 2-fluoro-modified nucleoside
  modified_base 1: mod_base = OTHER; note = 2-O-methyl modified nucleoside
  modified_base 3: mod_base = OTHER; note = 2-O-methyl modified nucleoside
  modified_base 5: mod_base = OTHER; note = 2-O-methyl modified nucleoside
  modified_base 7: mod_base = OTHER; note = 2-O-methyl modified nucleoside
  modified_base 9: mod_base = OTHER; note = 2-O-methyl modified nucleoside
  modified_base 11: mod_base = OTHER; note = 2-O-methyl modified nucleoside
  modified_base 13: mod_base = OTHER; note = 2-O-methyl modified nucleoside
  modified_base 15: mod_base = OTHER; note = 2-O-methyl modified nucleoside
  modified_base 17: mod_base = OTHER; note = 2-O-methyl modified nucleoside
  modified_base 19: mod_base = OTHER; note = 2-O-methyl modified nucleoside
  modified_base 20: mod_base = OTHER; note = 2-O-methyl modified nucleoside
  modified_base 21: mod_base = OTHER; note = 2-O-methyl modified nucleoside
tgatgtgaaaaacttgtcatt

SEQ ID NO: 3709 - RNA, 21 nt, synthetic construct
  source 1..21: mol_type = other RNA
  modified_base 1^2: mod_base = OTHER; note = phosphorothioate linkage
  modified_base 2^3: mod_base = OTHER; note = phosphorothioate linkage
  modified_base 19^20: mod_base = OTHER; note = phosphorothioate linkage
  modified_base 20^21: mod_base = OTHER; note = phosphorothioate linkage
  modified_base 2: mod_base = OTHER; note = 2-fluoro-modified nucleoside
  modified_base 4: mod_base = OTHER; note = 2-fluoro-modified nucleoside
  modified_base 6: mod_base = OTHER; note = 2-fluoro-modified nucleoside
  modified_base 8: mod_base = OTHER; note = 2-fluoro-modified nucleoside
  modified_base 10: mod_base = OTHER; note = 2-fluoro-modified nucleoside
  modified_base 12: mod_base = OTHER; note = 2-fluoro-modified nucleoside
  modified_base 14: mod_base = OTHER; note = 2-fluoro-modified nucleoside
  modified_base 16: mod_base = OTHER; note = 2-fluoro-modified nucleoside
  modified_base 18: mod_base = OTHER; note = 2-fluoro-modified nucleoside
  modified_base 1: mod_base = OTHER; note = 2-O-methyl modified nucleoside
  modified_base 3: mod_base = OTHER; note = 2-O-methyl modified nucleoside
  modified_base 5: mod_base = OTHER; note = 2-O-methyl modified nucleoside
  modified_base 7: mod_base = OTHER; note = 2-O-methyl modified nucleoside
  modified_base 8: mod_base = OTHER; note = 2-O-methyl modified nucleoside
  modified_base 9: mod_base = OTHER; note = 2-O-methyl modified nucleoside
  modified_base 11: mod_base = OTHER; note = 2-O-methyl modified nucleoside
  modified_base 13: mod_base = OTHER; note = 2-O-methyl modified nucleoside
  modified_base 15: mod_base = OTHER; note = 2-O-methyl modified nucleoside
  modified_base 17: mod_base = OTHER; note = 2-O-methyl modified nucleoside
  modified_base 19: mod_base = OTHER; note = 2-O-methyl modified nucleoside
  modified_base 20: mod_base = OTHER; note = 2-O-methyl modified nucleoside
  modified_base 21: mod_base = OTHER; note = 2-O-methyl modified nucleoside
tgatgtgaaaaacttgtcatt

SEQ ID NO: 3710 - RNA, 21 nt, synthetic construct
  source 1..21: mol_type = other RNA
  modified_base 1^2: mod_base = OTHER; note = phosphorothioate linkage
  modified_base 2^3: mod_base = OTHER; note = phosphorothioate linkage
  modified_base 19^20: mod_base = OTHER; note = phosphorothioate linkage
  modified_base 20^21: mod_base = OTHER; note = phosphorothioate linkage
  modified_base 2: mod_base = OTHER; note = 2-fluoro-modified nucleoside
  modified_base 4: mod_base = OTHER; note = 2-fluoro-modified nucleoside
  modified_base 6: mod_base = OTHER; note = 2-fluoro-modified nucleoside
  modified_base 8: mod_base = OTHER; note = 2-fluoro-modified nucleoside
  modified_base 10: mod_base = OTHER; note = 2-fluoro-modified nucleoside
  modified_base 12: mod_base = OTHER; note = 2-fluoro-modified nucleoside
  modified_base 14: mod_base = OTHER; note = 2-fluoro-modified nucleoside
  modified_base 16: mod_base = OTHER; note = 2-fluoro-modified nucleoside
  modified_base 18: mod_base = OTHER; note = 2-fluoro-modified nucleoside
  modified_base 1: mod_base = OTHER; note = 2-O-methyl modified nucleoside
  modified_base 3: mod_base = OTHER; note = 2-O-methyl modified nucleoside
  modified_base 5: mod_base = OTHER; note = 2-O-methyl modified nucleoside
  modified_base 7: mod_base = OTHER; note = 2-O-methyl modified nucleoside
  modified_base 9: mod_base = OTHER; note = 2-O-methyl modified nucleoside
  modified_base 11: mod_base = OTHER; note = 2-O-methyl modified nucleoside
  modified_base 13: mod_base = OTHER; note = 2-O-methyl modified nucleoside
  modified_base 15: mod_base = OTHER; note = 2-O-methyl modified nucleoside
  modified_base 17: mod_base = OTHER; note = 2-O-methyl modified nucleoside
  modified_base 19: mod_base = OTHER; note = 2-O-methyl modified nucleoside
  modified_base 20: mod_base = OTHER; note = 2-O-methyl modified nucleoside
  modified_base 21: mod_base = OTHER; note = 2-O-methyl modified nucleoside
tgatgtgaaaaacttgtcatt

SEQ ID NO: 3711 - RNA, 21 nt, synthetic construct
  source 1..21: mol_type = other RNA
  modified_base 1^2: mod_base = OTHER; note = phosphorothioate linkage
  modified_base 2^3: mod_base = OTHER; note = phosphorothioate linkage
  modified_base 19^20: mod_base = OTHER; note = phosphorothioate linkage
  modified_base 20^21: mod_base = OTHER; note = phosphorothioate linkage
  modified_base 2: mod_base = OTHER; note = 2-fluoro-modified nucleoside
  modified_base 4: mod_base = OTHER; note = 2-fluoro-modified nucleoside
  modified_base 6: mod_base = OTHER; note = 2-O-methyl modified nucleoside
  modified_base 8: mod_base = OTHER; note = 2-O-methyl modified nucleoside
  modified_base 10: mod_base = OTHER; note = 2-O-methyl modified nucleoside
  modified_base 12: mod_base = OTHER; note = 2-fluoro-modified nucleoside
  modified_base 14: mod_base = OTHER; note = 2-fluoro-modified nucleoside
  modified_base 16: mod_base = OTHER; note = 2-fluoro-modified nucleoside
  modified_base 18: mod_base = OTHER; note = 2-fluoro-modified nucleoside
  modified_base 1: mod_base = OTHER; note = 2-O-methyl modified nucleoside
  modified_base 3: mod_base = OTHER; note = 2-O-methyl modified nucleoside
  modified_base 5: mod_base = OTHER; note = 2-O-methyl modified nucleoside
  modified_base 7: mod_base = OTHER; note = 2-fluoro-modified nucleoside
  modified_base 9: mod_base = OTHER; note = 2-O-methyl modified nucleoside
  modified_base 11: mod_base = OTHER; note = 2-O-methyl modified nucleoside
  modified_base 13: mod_base = OTHER; note = 2-O-methyl modified nucleoside
  modified_base 15: mod_base = OTHER; note = 2-O-methyl modified nucleoside
  modified_base 17: mod_base = OTHER; note = 2-O-methyl modified nucleoside
  modified_base 19: mod_base = OTHER; note = 2-O-methyl modified nucleoside
  modified_base 20: mod_base = OTHER; note = 2-O-methyl modified nucleoside
  modified_base 21: mod_base = OTHER; note = 2-O-methyl modified nucleoside
tgatgtgaaaaacttgtcatt

SEQ ID NO: 3712 - RNA, 21 nt, synthetic construct
  source 1..21: mol_type = other RNA
  modified_base 1^2: mod_base = OTHER; note = phosphorothioate linkage
  modified_base 2^3: mod_base = OTHER; note = phosphorothioate linkage
  modified_base 19^20: mod_base = OTHER; note = phosphorothioate linkage
  modified_base 20^21: mod_base = OTHER; note = phosphorothioate linkage
  modified_base 2: mod_base = OTHER; note = 2-fluoro-modified nucleoside
  modified_base 4: mod_base = OTHER; note = 2-fluoro-modified nucleoside
  modified_base 6: mod_base = OTHER; note = 2-fluoro-modified nucleoside
  modified_base 8: mod_base = OTHER; note = 2-fluoro-modified nucleoside
  modified_base 10: mod_base = OTHER; note = 2-O-methyl modified nucleoside
  modified_base 12: mod_base = OTHER; note = 2-fluoro-modified nucleoside
  modified_base 14: mod_base = OTHER; note = 2-fluoro-modified nucleoside
  modified_base 16: mod_base = OTHER; note = 2-fluoro-modified nucleoside
  modified_base 18: mod_base = OTHER; note = 2-fluoro-modified nucleoside
  modified_base 1: mod_base = OTHER; note = 2-O-methyl modified nucleoside
  modified_base 3: mod_base = OTHER; note = 2-O-methyl modified nucleoside
  modified_base 5: mod_base = OTHER; note = 2-O-methyl modified nucleoside
  modified_base 7: mod_base = OTHER; note = 2-O-methyl modified nucleoside
  modified_base 9: mod_base = OTHER; note = 2-O-methyl modified nucleoside
  modified_base 11: mod_base = OTHER; note = 2-O-methyl modified nucleoside
  modified_base 13: mod_base = OTHER; note = 2-O-methyl modified nucleoside
  modified_base 15: mod_base = OTHER; note = 2-O-methyl modified nucleoside
  modified_base 17: mod_base = OTHER; note = 2-O-methyl modified nucleoside
  modified_base 19: mod_base = OTHER; note = 2-O-methyl modified nucleoside
  modified_base 20: mod_base = OTHER; note = 2-O-methyl modified nucleoside
  modified_base 21: mod_base = OTHER; note = 2-O-methyl modified nucleoside
tgatgtgaaaaacttgtcatt

SEQ ID NO: 3713 - RNA, 19 nt, synthetic construct
  source 1..19: mol_type = other RNA
gatgaaagattcggtagta

SEQ ID NO: 3714 - RNA, 19 nt, synthetic construct
  source 1..19: mol_type = other RNA
gatgaaagattcggtagta

SEQ ID NO: 3715 - RNA, 19 nt, synthetic construct
  source 1..19: mol_type = other RNA
gatgaaagattcggtagta

SEQ ID NO: 3716 - RNA, 19 nt, synthetic construct
  source 1..19: mol_type = other RNA
gatgaaagattcggtagta

SEQ ID NO: 3717 - RNA, 19 nt, synthetic construct
  source 1..19: mol_type = other RNA
gatgaaagattcggtagta

SEQ ID NO: 3718 - RNA, 19 nt, synthetic construct
  source 1..19: mol_type = other RNA
tgacaagtttttcacatca

SEQ ID NO: 3719 - RNA, 19 nt, synthetic construct
  source 1..19: mol_type = other RNA
tgacaagtttttcacatca

SEQ ID NO: 3720 - RNA, 19 nt, synthetic construct
  source 1..19: mol_type = other RNA
tgacaagtttttcacatca

SEQ ID NO: 3721 - RNA, 19 nt, synthetic construct
  source 1..19: mol_type = other RNA
tgacaagtttttcacatca

SEQ ID NO: 3722 - RNA, 19 nt, synthetic construct
  source 1..19: mol_type = other RNA
taccaaggtggcacttaca

SEQ ID NO: 3723 - RNA, 19 nt, synthetic construct
  source 1..19: mol_type = other RNA
tgacaagtttttcacatca

SEQ ID NO: 3724 - RNA, 19 nt, synthetic construct
  source 1..19: mol_type = other RNA
gatgaaagattcggtagta

SEQ ID NO: 3725 - RNA, 19 nt, synthetic construct
  source 1..19: mol_type = other RNA
tgacaagtttttcacatca

SEQ ID NO: 3726 - RNA, 19 nt, synthetic construct
  source 1..19: mol_type = other RNA
gaagattcatttgataaga

SEQ ID NO: 3727 - RNA, 19 nt, synthetic construct
  source 1..19: mol_type = other RNA
gatgaaagattcggtagta

SEQ ID NO: 3728 - RNA, 19 nt, synthetic construct
  source 1..19: mol_type = other RNA
agacatcatgagttggtca

SEQ ID NO: 3729 - RNA, 19 nt, synthetic construct
  source 1..19: mol_type = other RNA
gacaagtttttcacatcca

SEQ ID NO: 3730 - RNA, 19 nt, synthetic construct
  source 1..19: mol_type = other RNA
taccaaggtggcacttaca

SEQ ID NO: 3731 - RNA, 19 nt, synthetic construct
  source 1..19: mol_type = other RNA
accaaggtggcacttacta

SEQ ID NO: 3732 - RNA, 19 nt, synthetic construct
  source 1..19: mol_type = other RNA
tgacaagtttttcacatca

SEQ ID NO: 3733 - RNA, 19 nt, synthetic construct
  source 1..19: mol_type = other RNA
gatgaaagattcggtagta

SEQ ID NO: 3734 - RNA, 19 nt, synthetic construct
  source 1..19: mol_type = other RNA
gatgaaagattcggtagta

SEQ ID NO: 3735 - RNA, 19 nt, synthetic construct
  source 1..19: mol_type = other RNA
tgacaagtttttcacatca

SEQ ID NO: 3736 - RNA, 19 nt, synthetic construct
  source 1..19: mol_type = other RNA
gatgaaagattcggtagta

SEQ ID NO: 3737 - RNA, 19 nt, synthetic construct
  source 1..19: mol_type = other RNA
gatgaaagattcggtagta

SEQ ID NO: 3738 - RNA, 19 nt, synthetic construct
  source 1..19: mol_type = other RNA
gaagattcatttgataaga

SEQ ID NO: 3739 - RNA, 19 nt, synthetic construct
  source 1..19: mol_type = other RNA
gatgaaagattcggtagta

SEQ ID NO: 3740 - RNA, 19 nt, synthetic construct
  source 1..19: mol_type = other RNA
gatgaaagattcggtagta

SEQ ID NO: 3741 - RNA, 19 nt, synthetic construct
  source 1..19: mol_type = other RNA
gatgaaagattcggtagta

SEQ ID NO: 3742 - RNA, 19 nt, synthetic construct
  source 1..19: mol_type = other RNA
gatgaaagattcggtagta

SEQ ID NO: 3743 - RNA, 19 nt, synthetic construct
  source 1..19: mol_type = other RNA
gatgaaagattcggtagta

SEQ ID NO: 3744 - RNA, 19 nt, synthetic construct
  source 1..19: mol_type = other RNA
gatgaaagattcggtagta

SEQ ID NO: 3745 - RNA, 19 nt, synthetic construct
  source 1..19: mol_type = other RNA
gatgaaagattcggtagta

SEQ ID NO: 3746 - RNA, 19 nt, synthetic construct
  source 1..19: mol_type = other RNA
ctcaatggagtttattaca

SEQ ID NO: 3747 - RNA, 19 nt, synthetic construct
  source 1..19: mol_type = other RNA
tgacaagtttttcacatca

SEQ ID NO: 3748 - RNA, 19 nt, synthetic construct
  source 1..19: mol_type = other RNA
tcaatggagtttattacca

SEQ ID NO: 3749 - RNA, 19 nt, synthetic construct
  source 1..19: mol_type = other RNA
tactaccgaatctttcatc

SEQ ID NO: 3750 - RNA, 19 nt, synthetic construct
  source 1..19: mol_type = other RNA
tactaccgaatctttcatc

SEQ ID NO: 3751 - RNA, 19 nt, synthetic construct
  source 1..19: mol_type = other RNA
tactaccgaatctttcatc

SEQ ID NO: 3752 - RNA, 19 nt, synthetic construct
  source 1..19: mol_type = other RNA
tactaccgaatctttcatc

SEQ ID NO: 3753 - RNA, 19 nt, synthetic construct
  source 1..19: mol_type = other RNA
tactaccgaatctttcatc

SEQ ID NO: 3754 - RNA, 19 nt, synthetic construct
  source 1..19: mol_type = other RNA
tgatgtgaaaaacttgtca

SEQ ID NO: 3755 - RNA, 19 nt, synthetic construct
  source 1..19: mol_type = other RNA
tgatgtgaaaaacttgtca

SEQ ID NO: 3756 - RNA, 19 nt, synthetic construct
  source 1..19: mol_type = other RNA
tgatgtgaaaaacttgtca

SEQ ID NO: 3757 - RNA, 19 nt, synthetic construct
  source 1..19: mol_type = other RNA
tgatgtgaaaaacttgtca

SEQ ID NO: 3758 - RNA, 19 nt, synthetic construct
  source 1..19: mol_type = other RNA
tgtaagtgccaccttggta

SEQ ID NO: 3759 - RNA, 19 nt, synthetic construct
  source 1..19: mol_type = other RNA
tgatgtgaaaaacttgtca

SEQ ID NO: 3760 - RNA, 19 nt, synthetic construct
  source 1..19: mol_type = other RNA
tactaccgaatctttcatc

SEQ ID NO: 3761 - RNA, 19 nt, synthetic construct
  source 1..19: mol_type = other RNA
tgatgtgaaaaacttgtca

SEQ ID NO: 3762 - RNA, 19 nt, synthetic construct
  source 1..19: mol_type = other RNA
tcttatcaaatgaatcttc

SEQ ID NO: 3763 - RNA, 19 nt, synthetic construct
  source 1..19: mol_type = other RNA
tactaccgaatctttcatc

SEQ ID NO: 3764 - RNA, 19 nt, synthetic construct
  source 1..19: mol_type = other RNA
tgaccaactcatgatgtct

SEQ ID NO: 3765 - RNA, 19 nt, synthetic construct
  source 1..19: mol_type = other RNA
tggatgtgaaaaacttgtc

SEQ ID NO: 3766 - RNA, 19 nt, synthetic construct
  source 1..19: mol_type = other RNA
tgtaagtgccaccttggta

SEQ ID NO: 3767 - RNA, 19 nt, synthetic construct
  source 1..19: mol_type = other RNA
tagtaagtgccaccttggt

SEQ ID NO: 3768 - RNA, 19 nt, synthetic construct
  source 1..19: mol_type = other RNA
tgatgtgaaaaacttgtca

SEQ ID NO: 3769 - RNA, 19 nt, synthetic construct
  source 1..19: mol_type = other RNA
tactaccgaatctttcatc

SEQ ID NO: 3770 - RNA, 19 nt, synthetic construct
  source 1..19: mol_type = other RNA
tactaccgaatctttcatc

SEQ ID NO: 3771 - RNA, 19 nt, synthetic construct
  source 1..19: mol_type = other RNA
tgatgtgaaaaacttgtca

SEQ ID NO: 3772 - RNA, 19 nt, synthetic construct
  source 1..19: mol_type = other RNA
tactaccgaatctttcatc

SEQ ID NO: 3773 - RNA, 19 nt, synthetic construct
  source 1..19: mol_type = other RNA
tactaccgaatctttcatc

SEQ ID NO: 3774 - RNA, 19 nt, synthetic construct
  source 1..19: mol_type = other RNA
tcttatcaaatgaatcttc

SEQ ID NO: 3775 - RNA, 19 nt, synthetic construct
  source 1..19: mol_type = other RNA
tactaccgaatctttcatc

SEQ ID NO: 3776 - RNA, 19 nt, synthetic construct
  source 1..19: mol_type = other RNA
tactaccgaatctttcatc

SEQ ID NO: 3777 - RNA, 19 nt, synthetic construct
  source 1..19: mol_type = other RNA
tactaccgaatctttcatc

SEQ ID NO: 3778 - RNA, 19 nt, synthetic construct
  source 1..19: mol_type = other RNA
tactaccgaatctttcatc

SEQ ID NO: 3779 - RNA, 19 nt, synthetic construct
  source 1..19: mol_type = other RNA
tactaccgaatctttcatc

SEQ ID NO: 3780 - RNA, 19 nt, synthetic construct
  source 1..19: mol_type = other RNA
tactaccgaatctttcatc

SEQ ID NO: 3781 - RNA, 19 nt, synthetic construct
  source 1..19: mol_type = other RNA
tactaccgaatctttcatc

SEQ ID NO: 3782 - RNA, 19 nt, synthetic construct
  source 1..19: mol_type = other RNA
tgtaataaactccattgag

SEQ ID NO: 3783 - RNA, 19 nt, synthetic construct
  source 1..19: mol_type = other RNA
tgatgtgaaaaacttgtca

SEQ ID NO: 3784 - RNA, 19 nt, synthetic construct
  source 1..19: mol_type = other RNA
tggtaataaactccattga

SEQ ID NO: 3785-3786 - skipped (2 entries)
